(19) United States
(12) Patent Application Publication
(10) Pub. No.: US 2011/0159003 A1
(43) Pub. Date: Jun. 30, 2011

(54) Ligands That Bind Il-4 and/or Il-13

(75) Inventors: Ian Tomlinson, Hertfordshire (GB); Allart Adriaan Stoop, Cambridgeshire (GB); Armin Sepp, Cambridgeshire (GB); Inusha De Silva, Cambridgeshire (GB); Caroline J. Dimech, Hertfordshire (GB); Malgorzata Pupecka, Cambridgeshire (GB); Rudolf M.T. De Wildt, Hertfordshire (GB); Philip D. Drew, Cambridgeshire (GB); Steve Holmes, Cambridgeshire (GB)

(73) Assignee: Domantis Limited, Brentford, Middlesex (GB)

(21) Appl. No.: 12/223,005

(22) PCT Filed: Jan. 24, 2007
(86) PCT No.: PCT/GB2007/000228

§ 371 Date: Mar. 16, 2011

Related U.S. Application Data
(60) Provisional application No. 60/761,708, filed on Jan. 24, 2006.

(51) Int. Cl. A61K 39/395; C07K 16/24; C12N 15/13; C12N 15/63; C12N 5/00; C12P 21/00; A61P 37/08; A61P 37/06; A61P 11/06; A61P 35/00

(52) U.S. Cl. 424/158.1; 530/389.2; 530/387.3; 536/23.53; 435/320.1; 435/325; 435/69.6

(57) ABSTRACT

Disclosed are ligands that have binding specificity for interleukin-4 (IL-4), for interleukin-13 (IL-13), or for IL-4 and IL-13. Also disclosed are methods of using these ligands. In particular, the use of these ligands for treating allergic asthma is described.

### RELATED APPLICATION

[0001] This application claims the benefit of U.S. Provisional Application No. 60/761,708, filed on Jan. 24, 2006. The entire teachings of the above application are incorporated herein by reference.

### BACKGROUND OF THE INVENTION

[0002] Interleukin-4 (IL-4) is a pleiotropic cytokine that has a broad spectrum of biological effects on B cells, T cells, and many non-lymphoid cells including monocytes, endothelial cells and fibroblasts. For example, IL-4 stimulates the proliferation of several IL-2- and IL-3-dependent cell lines, induces the expression of class II major histocompatability complex molecules on resting B cells, and enhances the secretion of IgG4 and IgE by human B cells. IL-4 is associated with a Th2-type immune response, and is produced by and promotes differentiation of Th2 cells. IL-4 has been implicated in a number of disorders, such as allergy and asthma.

[0003] Interleukin-13 (IL-13) is a pleiotropic cytokine that induces immunoglobulin isotype switching to IgG4 and IgE, CD23 up regulation, VCAM-1 expression, and directly activates eosinphils and mast cells, for example. IL-13 is mainly produced by Th2 cells and inhibits the production of inflammatory cytokines (IL-1, IL-6, TNF, IL-8) by LPS-stimulated monocytes, IL-13 is closely related to IL-4 with which it shares 20-25% sequence similarity at the amino acid level. (Minty et. al., Nature, 363 (6417):248-50 (1993)). Although many activities of IL-13 are similar to those of IL-4, IL-13 does not have growth promoting effects on activated T cells or T cells clones as IL-4 does. (Zurawski et al., EMBO J. 12:2663 (1993)).

[0004] The cell surface receptors and receptor complexes bind IL-4 and/or IL-13 with different affinities. The principle components of receptors and receptor complexes that bind IL-4 and/or IL-13 are IL-4Rα, IL-13Rα1 and IL-13Rα2. These chains are expressed on the surface of cells as monomers or heterodimers of IL-4Rα/IL-13Rα1 or IL-4Rα/IL-13Rα2. IL-4rα monomer binds IL-4, but not IL-13. IL-13Rα1 and IL-13Rα2 monomers bind IL-13, but do not bind IL-4. IL-4Rα/IL-13Rα1 and IL-4Rα/IL-13Rα2 heterodimers bind both IL-4 and IL-13.

[0005] Th2-type immune responses promote antibody production and humoral immunity, and are elaborated to fight off extracellular pathogens. Th2 cells are mediators of Ig production (humoral immunity) and produce IL-4, IL-5, IL-6, IL-9, IL-10 and IL-13 (Tanaka, et, al., Cytokine Regulation of Humoral Immunity, 251-272, Snapper, ed., John Wiley and Sons, New York (1996)). Th2-type immune responses are characterized by the generation of certain cytokines (e.g., IL-4, IL-13) and specific types of antibodies (IgE, IgG4) and are typical of allergic reactions, which may result in watery eyes and asthmatic symptoms, such as airway inflammation and contraction of airway muscle cells in the lungs.

[0006] Both IL-4 and IL-13 are therapeutically important proteins based on their biological functions. IL-4 has been shown to be able to inhibit autoimmune disease and IL-4 and IL-13 have both shown the potential to enhance anti-tumor immune responses. Since both cytokines are involved in the pathogenesis of allergic diseases, inhibitors of these cytokines could provide therapeutic benefits. However, inhibiting only IL-4 or IL-13 using conventional agents may not provide desired therapeutic results because many of the activities and functions of these cytokines are similar. Accordingly, a need exists for improved agents that inhibit IL-4, inhibit IL-13, and single agents that inhibit both IL-4 and IL-13

### SUMMARY OF THE INVENTION

[0007] The invention relates to ligands that have binding specificity for IL-4 (e.g., human IL-4), ligands that have binding specificity for IL-13 (e.g., human IL-13), and to ligands that have binding specificity for IL-4 and IL-13 (e.g., human IL-4 and human IL-13). For example, the ligand can comprise a polypeptide domain having a binding site with binding specificity for IL-4, a polypeptide domain having a binding site with binding specificity for IL-13, or comprise a polypeptide domain having a binding site with binding specificity for IL-4 and a polypeptide domain having a binding site with binding specificity for IL-13.

[0008] In one aspect, the invention relates to a ligand that has binding specificity for IL-4 and for IL-13. Such ligands comprise a protein moiety that has a binding site with binding specificity for IL-4 and a protein moiety that has a binding site with binding specificity for IL-13. The protein moiety that has a binding site with binding specificity for IL-4 and the protein moiety that has a binding site with binding specificity for IL-13 can be any suitable binding moiety. The protein moieties can be a peptide moiety, polypeptide moiety or protein moiety. For example, the protein moieties can be provided by an antibody fragment that has a binding site with binding specificity for IL-4 or IL-13, such as an immunoglobulin single variable domain that has binding specificity for IL-4 or IL-13.

[0009] The ligand can comprise a protein moiety that has a binding site with binding specificity for IL-4 that competes for binding to IL-4 with IL-4Rα, an IL-4-binding portion of IL-4Rα or an anti-IL-4 domain antibody (dAb). In some embodiments, the ligand comprises a protein moiety that has a binding site with binding specificity for IL-4 (e.g., an immunoglobulin single variable domain) that competes for binding to IL-4 with an anti-IL-4 dAb selected from the group consisting of the anti-IL-4 dAbs disclosed herein (i.e., DOM9-15 (SEQ ID NO:175), DOM9-17 (SEQ ID NO:176), DOM9-23 (SEQ ID NO:177), DOM9-24 (SEQ ID NO:178), DOM9-25 (SEQ ID NO:179), DOM9-27 (SEQ ID NO:180), DOM9-28 (SEQ ID NO:181), DOM9-29 (SEQ ID NO:182), DOM9-30 (SEQ ID NO:183), DOM9-31 (SEQ ID NO:184), DOM9-32 (SEQ ID NO:185), DOM9-33 (SEQ ID NO:186), DOM9-50 (SEQ ID NO:187), DOM9-57 (SEQ ID NO:188), DOM9-59 (SEQ ID NO:189), DOM9-63 (SEQ ID NO:190), DOM9-67 (SEQ ID NO:191), DOM9-68 (SEQ ID NO:192), DOM9-70 (SEQ ID NO:193), DOM9-79 (SEQ ID NO:194), DOM9-82 (SEQ ID NO:195), DOM9-86 (SEQ ID NO:196), DOM9-94 (SEQ ID NO:197), DOM9-108 (SEQ ID NO:198), DOM9-112 (SEQ ID NO:199), DOM9-112-1 (SEQ ID NO:200), DOM9-112-2 (SEQ ID NO:201), DOM9-112-3 (SEQ ID NO:202), DOM9-112-4 (SEQ ID NO:203), DOM9-112-5 (SEQ ID NO:204), DOM9-112-6 (SEQ ID NO:205), DOM9-112-7 (SEQ ID NO:206), DOM9-112-8 (SEQ ID NO:207), DOM9-112-9 (SEQ ID NO:208), DOM9-112-10 (SEQ ID NO:209), DOM9-112-11 (SEQ ID NO:210), DOM9-112-12 (SEQ ID NO:211), DOM9-112-13 (SEQ ID NO:212), DOM9-112-14 (SEQ ID NO:213), DOM9-112-15 (SEQ ID NO:214), DOM9-112-16 (SEQ ID NO:215), DOM9-112-17 (SEQ ID NO:216), DOM9-112-18 (SEQ ID NO:217), DOM9-112-19 (SEQ ID NO:218), DOM9-112-20 (SEQ ID NO:219), DOM9-112-21 (SEQ ID NO:220), DOM9-112-22 (SEQ ID NO:221), DOM9-112-23 (SEQ ID NO:222), DOM9-112-25 (SEQ ID NO:223), DOM9-112-81 (SEQ ID NO:224), DOM9-112-82 (SEQ ID NO:225), DOM9-112-83 (SEQ ID NO:226), DOM9-112-84 (SEQ ID NO:227), DOM9-112-85 (SEQ ID NO:228), DOM9-112-86 (SEQ ID NO:229), DOM9-112-87 (SEQ ID NO:230), DOM9-112-88 (SEQ ID NO:231), DOM9-112-89 (SEQ ID NO:232), DOM9-112-90 (SEQ ID NO:233), DOM9-112-91 (SEQ ID NO:234), DOM9-112-92 (SEQ ID NO:235), DOM9-112-93 (SEQ ID NO:236), DOM9-112-94 (SEQ ID NO:237), DOM9-112-95 (SEQ ID NO:238), DOM9-112-96 (SEQ ID NO:239), DOM9-112-97 (SEQ ID NO:240), DOM9-112-98 (SEQ ID NO:241), DOM9-112-99 (SEQ ID NO:242), DOM9-112-100 (SEQ ID NO:243), DOM9-112-101 (SEQ ID NO:244), DOM9-1132-102 (SEQ ID NO:245), DOM9-112-103 (SEQ ID NO:246), DOM9-112-104 (SEQ ID NO:247), DOM9-112-105 (SEQ ID NO:248), DOM9-112-106 (SEQ ID NO:249), DOM9-112-107 (SEQ ID NO:250), DOM9-112-108 (SEQ ID NO:251), DOM9-112-109 (SEQ ID NO:252), DOM9-112-110 (SEQ ID NO:253), DOM9-112-111 (SEQ ID NO:254), DOM9-112-112 (SEQ ID NO:255), DOM9-112-113 (SEQ ID NO:256), DOM9-112-114 (SEQ ID NO:257), DOM9-112-115 (SEQ ID NO:258), DOM9-112-116 (SEQ ID NO:259), DOM9-112-117 (SEQ ID NO:260), DOM9-112-118 (SEQ ID NO:261), DOM9-112-119 (SEQ ID NO:262), DOM9-112-120 (SEQ ID NO:263), DOM9-112-121 (SEQ ID NO:264), DOM9-112-122 (SEQ ID NO:265), DOM9-112-123 (SEQ ID NO:266), DOM9-112-124 (SEQ ID NO:267), DOM9-112-125 (SEQ ID NO:268), DOM9-112-126 (SEQ ID NO:269), DOM9-112-127 (SEQ ID NO:270), DOM9-112-128 (SEQ ID NO:271), DOM9-112-134 (SEQ ID NO:272), DOM9-112-135 (SEQ ID NO:273), DOM9-112-136 (SEQ ID NO:274), DOM9-112-137 (SEQ ID NO:275), DOM9-112-138 (SEQ ID NO:276), DOM9-112-140 (SEQ ID NO:277), DOM9-112-141 (SEQ ID NO:278), DOM9-112-142 (SEQ ID NO:279), DOM9-112-143 (SEQ ID NO:280), DOM9-112-144 (SEQ ID NO:281), DOM9-112-145 (SEQ ID NO:282), DOM9-112-146 (SEQ ID NO:283), DOM9-112-147 (SEQ ID NO:284), DOM9-112-148 (SEQ ID NO:285), DOM9-112-149 (SEQ ID NO:286), DOM9-112-150 (SEQ ID NO:287), DOM9-112-151 (SEQ ID NO:288), DOM9-112-152 (SEQ ID NO:289), DOM9-112-153 (SEQ ID NO:290), DOM9-112-154 (SEQ ID NO:291), DOM9-112-155 (SEQ ID NO:292), DOM9-112-156 (SEQ ID NO:293), DOM9-112-157 (SEQ ID NO:294), DOM9-112-158 (SEQ ID NO:295), DOM9-112-159 (SEQ ID NO:296), DOM9-112-160 (SEQ ID NO:297), DOM9-112-161 (SEQ ID NO:298), DOM9-112-162 (SEQ ID NO:299), DOM9-112-163 (SEQ ID NO:300), DOM9-112-164 (SEQ ID NO:301), DOM9-112-165 (SEQ ID NO:302), DOM9-112-166 (SEQ ID NO:303), DOM9-112-167 (SEQ ID NO:304), DOM9-112-168 (SEQ ID NO:305), DOM9-112-169 (SEQ ID NO:306), DOM9-112-170 (SEQ ID NO:307), DOM9-112-171 (SEQ ID NO:308), DOM9-112-172 (SEQ ID NO:309), DOM9-112-173 (SEQ ID NO:310), DOM9-112-174 (SEQ ID NO:311), DOM9-112-175 (SEQ ID NO:312), DOM9-112-176 (SEQ ID NO:313), DOM9-112-177 (SEQ ID NO:314), DOM9-112-178 (SEQ ID NO:315), DOM9-112-179 (SEQ ID NO:316), DOM9-112-180 (SEQ ID NO:317), DOM9-112-181 (SEQ ID NO:318), DOM9-112-182 (SEQ ID NO:319), DOM9-112-183 (SEQ ID NO:320), DOM9-112-184 (SEQ ID NO:321), DOM9-112-185 (SEQ ID NO:322), DOM9-112-186 (SEQ ID NO:323), DOM9-112-187 (SEQ ID NO:324), DOM9-112-188 (SEQ ID NO:325), DOM9-112-189 (SEQ ID NO:326), DOM9-112-190 (SEQ ID NO:327), DOM9-112-191 (SEQ ID NO:328), DOM9-112-192 (SEQ ID NO:329), DOM9-112-193 (SEQ ID NO:330), DOM9-112-194 (SEQ ID NO:331), DOM9-112-195 (SEQ ID NO:332), DOM9-112-196 (SEQ ID NO:333), DOM9-112-197 (SEQ ID NO:334), DOM9-112-198 (SEQ ID NO:335), DOM9-112-199 (SEQ ID NO:336), DOM9-112-200 (SEQ ID NO:337), DOM9-112-201 (SEQ ID NO:338), DOM9-112-202 (SEQ ID NO:339), DOM9-120 (SEQ ID NO:340), DOM9-121 (SEQ ID NO:341), DOM9-122 (SEQ ID NO:342), DOM9-123 (SEQ ID NO:343), DOM9-124 (SEQ ID NO:344), DOM9-125 (SEQ ID NO:345), DOM9-128 (SEQ ID NO:346), DOM9-134 (SEQ ID NO:347), DOM9-136 (SEQ ID NO:348), DOM9-26 (SEQ ID NO:500), DOM9-35 (SEQ ID NO:501), DOM9-36 (SEQ ID NO:502), DOM9-37 (SEQ ID NO:503), DOM9-38 (SEQ ID NO:504), DOM9-39 (SEQ ID NO:505), DOM9-40 (SEQ ID NO:506), DOM9-41 (SEQ ID NO:507), DOM9-43 (SEQ ID NO:508), DOM9-44 (SEQ ID NO:509), DOM9-44-500 (SEQ ID NO:510), DOM9-44-501 (SEQ ID NO:511), DOM9-44-502 (SEQ ID NO:512), DOM9-44-503 (SEQ ID NO:513), DOM9-44-504 (SEQ ID NO:514), DOM9-44-505 (SEQ ID NO:515), DOM9-44-506 (SEQ ID NO:516), DOM9-44-507 (SEQ ID NO:517), DOM9-44-509 (SEQ ID NO:518), DOM9-44-510 (SEQ ID NO:519), DOM9-44-511 (SEQ ID NO:520), DOM9-44-512 (SEQ ID NO:521), DOM9-44-513 (SEQ ID NO:522), DOM9-44-514 (SEQ ID NO:523), DOM9-44-515 (SEQ ID NO:524), DOM9-44-516 (SEQ ID NO:525), DOM9-44-517 (SEQ ID NO:526), DOM9-44-518 (SEQ ID NO:527), DOM9-44-519 (SEQ ID NO:528), DOM9-44-520 (SEQ ID NO:529), DOM9-44-521 (SEQ ID NO:530), DOM9-44-522 (SEQ ID NO:531), DOM9-44-523 (SEQ ID NO:532), DOM9-44-524 (SEQ ID NO:533), DOM9-44-525 (SEQ ID NO:534), DOM9-44-526 (SEQ ID NO:535), DOM9-44-527 (SEQ ID NO:536), DOM9-44-528 (SEQ ID NO:537), DOM9-44-529 (SEQ ID NO:538), DOM9-44-530 (SEQ ID NO:539), DOM9-44-531 (SEQ ID NO:540), DOM9-44-532 (SEQ ID NO:541), DOM9-44-533 (SEQ ID NO:542), DOM9-44-534 (SEQ ID NO:543), DOM9-44-535 (SEQ ID NO:544), DOM9-44-536 (SEQ ID NO:545), DOM9-44-537 (SEQ ID NO:546), DOM9-44-538 (SEQ ID NO:547), DOM9-44-539 (SEQ ID NO:548), DOM9-44-540 (SEQ ID NO:549), DOM9-44-541 (SEQ ID NO:550), DOM9-44-542 (SEQ ID NO:551), DOM9-44-543 (SEQ ID NO:552), DOM9-44-544 (SEQ ID NO:553), DOM9-44-545 (SEQ ID NO:554), DOM9-44-546 (SEQ ID NO:555), DOM9-44-547 (SEQ ID NO:556), DOM9-44-548 (SEQ ID NO:557), DOM9-44-549 (SEQ ID NO:558), DOM9-44-550 (SEQ ID NO:559), DOM9-44-551 (SEQ ID NO:560), DOM9-44-552 (SEQ ID NO:561), DOM9-44-553 (SEQ ID NO:562), DOM9-44-554 (SEQ ID NO:563), DOM9-44-555 (SEQ ID NO:564), DOM9-44-556 (SEQ ID NO:565), DOM9-44-557 (SEQ ID NO:566), DOM9-44-558 (SEQ ID NO:567), DOM9-44-559 (SEQ ID NO:568), DOM9-44-560 (SEQ ID NO:569), DOM9-44-561 (SEQ ID NO:570), DOM9-44-562 (SEQ ID NO:571), DOM9-44-563 (SEQ ID NO:572), DOM9-44-564 (SEQ ID NO:573), DOM9-44-565 (SEQ ID NO:574), DOM9-44-566 (SEQ ID NO:575), DOM9-44-625 (SEQ ID NO:576), DOM19-44-626 (SEQ ID NO:577), DOM9-44-627 (SEQ ID NO:578), DOM9-44-628 (SEQ ID NO:579), DOM9-44-629 (SEQ ID NO:580), DOM9-44-630 (SEQ ID NO:581), DOM9-44-631 (SEQ ID NO:582), DOM9-44-632 (SEQ ID NO:583), DOM9-44-633 (SEQ ID NO:584), DOM9-44-634 (SEQ ID NO:585), DOM9-44-636 (SEQ ID NO:586), DOM9-44-637 (SEQ ID NO:587), DOM9-44-639 (SEQ ID NO:588), DOM9-44-640 (SEQ ID NO:589), DOM9-44-641 (SEQ ID NO:590), DOM9-44-642 (SEQ ID NO:591), DOM9-44-643 (SEQ ID NO:592), DOM9-44-644 (SEQ ID NO:593), DOM9-45 (SEQ ID NO:594), DOM9-46 (SEQ ID NO:595), DOM9-47 (SEQ ID NO:596), DOM9-48 (SEQ ID NO:597), DOM9-143 (SEQ ID NO:598), DOM9-144 (SEQ ID NO:599), DOM9-146 (SEQ ID NO:600), DOM9-152 (SEQ ID NO:601), DOM9-155 (SEQ ID NO:602), DOM9-155-001 (SEQ ID NO:603), DOM9-155-3 (SEQ ID NO:604), DOM9-155-5 (SEQ ID NO:605), DOM9-155-8 (SEQ ID NO:606), DOM9-155-9 (SEQ ID NO:607), DOM9-155-11 (SEQ ID NO:608), DOM9-155-13 (SEQ ID NO:609), DOM9-155-14 (SEQ ID NO:610), DOM9-155-17 (SEQ ID NO:611), DOM9-155-19 (SEQ ID NO:612), DOM9-155-20 (SEQ ID NO:613), DOM9-155-22 (SEQ ID NO:614), DOM9-155-23 (SEQ ID NO:615), DOM9-155-24 (SEQ ID NO:616), DOM9-155-25 (SEQ ID NO:617), DOM9-155-26 (SEQ ID NO:618), DOM9-155-27 (SEQ ID NO:619), DOM9-155-28 (SEQ ID NO:620), DOM9-155-29 (SEQ ID NO:621), DOM9-155-30 (SEQ ID NO:622), DOM9-155-31 (SEQ ID NO:623), DOM9-155-32 (SEQ ID NO:624), DOM9-155-33 (SEQ ID NO:625), DOM9-155-34 (SEQ ID NO:626), DOM9-155-35 (SEQ ID NO:627), DOM9-155-36 (SEQ ID NO:628), DOM9-155-37 (SEQ ID NO:629), DOM9-155-38 (SEQ ID NO:630), DOM9-155-39 (SEQ ID NO:631), DOM9-155-41 (SEQ ID NO:632), DOM9-155-42 (SEQ ID NO:633), DOM9-155-43 (SEQ ID NO:634), DOM9-155-44 (SEQ ID NO:635), DOM9-155-45 (SEQ ID NO:636), DOM9-155-46 (SEQ ID NO:637), DOM9-155-47 (SEQ ID NO:638), DOM9-155-48 (SEQ ID NO:639), DOM9-155-49 (SEQ ID NO:640), DOM9-155-50 (SEQ ID NO:641), DOM9-155-51 (SEQ ID NO:642), DOM9-155-52 (SEQ ID NO:643), DOM9-155-53 (SEQ ID NO:644), DOM9-158 (SEQ ID NO:645), DOM9-160 (SEQ ID NO:646), DOM9-161 (SEQ ID NO:647), DOM9-162 (SEQ ID NO:648), DOM9-163 (SEQ ID NO:649) and DOM9-164 (SEQ ID NO:650)).

[0010] In further embodiments, the ligand comprises a protein moiety that has a binding site with binding specificity for IL-4 (e.g., an immunoglobulin single variable domain) that competes for binding to IL-4 with an anti-IL-4 dAb selected from the group consisting of DOM9-15 (SEQ ID NO:175), DOM9-17 (SEQ ID NO:176), DOM9-23 (SEQ ID NO:177), DOM9-24 (SEQ ID NO:178), DOM9-25 (SEQ ID NO:179), DOM9-27 (SEQ ID NO:180), DOM9-28 (SEQ ID NO:181), DOM9-29 (SEQ ID NO:182), DOM9-30 (SEQ ID NO:183), DOM9-31 (SEQ ID NO:184), DOM9-32 (SEQ ID NO:185), DOM9-33 (SEQ ID NO:186), DOM9-50 (SEQ ID NO:187), DOM9-57 (SEQ ID 140:188), DOM9-59 (SEQ ID NO:189), DOM9-63 (SEQ ID NO:190), DOM9-67 (SEQ ID NO:191), DOM9-68 (SEQ ID NO:192), DOM9-70 (SEQ ID NO:193), DOM9-79 (SEQ ID NO:194), DOM9-82 (SEQ ID NO:195), DOM9-86 (SEQ ID NO:196), DOM9-94 (SEQ ID NO:197), DOM9-108 (SEQ ID NO:198), DOM9-112 (SEQ ID NO:199), DOM9-112-1 (SEQ ID NO:200), DOM9-112-2 (SEQ ID NO:201), DOM9-112-3 (SEQ ID NO:202), DOM9-112-4 (SEQ ID NO:203), DOM9-112-5 (SEQ ID NO:204), DOM9-112-6 (SEQ ID NO:205), DOM9-112-7 (SEQ ID NO:206), DOM9-112-8 (SEQ ID NO:207), DOM9-112-9 (SEQ ID NO:208), DOM9-112-10 (SEQ ID NO:209), DOM9-112-11 (SEQ ID NO:210), DOM9-112-12 (SEQ ID NO:211), DOM9-112-13 (SEQ ID NO:212), DOM9-112-14 (SEQ ID NO:213), DOM9-112-15 (SEQ ID NO:214), DOM9-112-16 (SEQ ID NO:215), DOM9-112-17 (SEQ ID NO:216), DOM9-112-18 (SEQ ID NO:217), DOM9-112-19 (SEQ ID NO:218), DOM9-112-20 (SEQ ID NO:219), DOM9-112-21 (SEQ ID NO:220), DOM9-112-22 (SEQ ID NO:221), DOM9-112-23 (SEQ ID NO:222), DOM9-112-25 (SEQ ID NO:223), DOM9-112-81 (SEQ ID NO:224), DOM9-112-82 (SEQ ID NO:225), DOM9-112-83 (SEQ ID NO:226), DOM9-112-84 (SEQ ID NO:227), DOM9-112-85 (SEQ ID NO:228), DOM9-112-86 (SEQ ID NO:229), DOM9-112-87 (SEQ ID NO:230), DOM9-112-88 (SEQ ID NO:231), DOM9-112-89 (SEQ ID NO:232), DOM19-112-90 (SEQ ID NO:233), DOM9-112-91 (SEQ ID NO:234), DOM9-112-92 (SEQ ID NO:235), DOM9-112-93 (SEQ ID NO:236), DOM9-112-94 (SEQ ID NO:237), DOM9-112-95 (SEQ ID NO:238), DOM9-112-96 (SEQ ID NO:239), DOM9-112-97 (SEQ ID NO:240), DOM9-112-98 (SEQ ID NO:241), DOM9-112-99 (SEQ ID NO:242), DOM9-112-100 (SEQ ID NO:243), DOM9-112-101 (SEQ ID NO:244), DOM9-1132-102 (SEQ ID NO:245), DOM9-112-103 (SEQ ID NO:246), DOM9-112-104 (SEQ ID NO:247), DOM9-112-105 (SEQ ID NO:248), DOM9-112-106 (SEQ ID NO:249), DOM9-112-107 (SEQ ID NO:250), DOM9-112-108 (SEQ ID NO:251), DOM9-112-109 (SEQ ID NO:252), DOM9-112-110 (SEQ ID NO:253), DOM9-112-111 (SEQ ID NO:254), DOM9-112-112 (SEQ ID NO:255), DOM9-112-113 (SEQ ID NO:256), DOM9-112-114 (SEQ ID NO:257), DOM9-112-115 (SEQ ID NO:258), DOM9-112-116 (SEQ ID NO:259), DOM9-112-117 (SEQ ID NO:260), DOM9-112-118 (SEQ ID NO:261), DOM9-112-119 (SEQ ID NO:262), DOM9-112-120 (SEQ ID NO:263), DOM9-112-121 (SEQ ID NO:264), DOM9-112-122 (SEQ ID NO:265), DOM9-112-123 (SEQ ID NO:266), DOM9-112-124 (SEQ ID NO:267), DOM9-112-125 (SEQ ID NO:268), DOM9-112-126 (SEQ ID NO:269), DOM9-112-127 (SEQ ID NO:270), DOM9-112-128 (SEQ ID NO:271), DOM9-112-134 (SEQ ID NO:272), DOM9-112-135 (SEQ ID NO:273), DOM9-112-136 (SEQ ID NO:274), DOM9-112-137 (SEQ ID NO:275), DOM9-112-138 (SEQ ID NO:276), DOM9-112-140 (SEQ ID NO:277), DOM9-112-141 (SEQ ID NO:278), DOM9-112-142 (SEQ ID NO:279), DOM9-112-143 (SEQ ID NO:280), DOM9-112-144 (SEQ ID NO:281), DOM9-112-145 (SEQ ID NO:282), DOM9-112-146 (SEQ ID NO:283), DOM9-112-147 (SEQ ID NO:284), DOM9-112-148 (SEQ ID NO:285), DOM9-112-149 (SEQ ID NO:286), DOM9-112-150 (SEQ ID NO:287), DOM9-112-151 (SEQ ID NO:288), DOM9-112-152 (SEQ ID NO:289), DOM9-112-153 (SEQ ID NO:290), DOM9-112-154 (SEQ ID NO:291), DOM9-112-155 (SEQ ID NO:292), DOM9-112-156 (SEQ ID NO:293), DOM9-112-157 (SEQ ID NO:294), DOM9-112-158 (SEQ ID NO:295), DOM9-112-159 (SEQ ID NO:296), DOM9-112-160 (SEQ ID NO:297), DOM9-112-161 (SEQ ID NO:298), DOM9-112-162 (SEQ ID NO:299), DOM9-112-163 (SEQ ID NO:300), DOM9-112-164 (SEQ ID NO:301), DOM9-112-165 (SEQ ID NO:302), DOM9-112-166 (SEQ ID NO:303), DOM9-112-167 (SEQ ID NO:304), DOM9-112-168 (SEQ ID NO:305), DOM9-112-169 (SEQ ID NO:306), DOM9-112-170 (SEQ ID NO:307), DOM9-112-171 (SEQ ID NO:308), DOM9-112-172 (SEQ ID NO:309), DOM9-112-173 (SEQ ID NO:310), DOM9-112-174 (SEQ ID NO:311), DOM9-112-175 (SEQ ID NO:312), DOM9-112-176 (SEQ ID NO:313), DOM9-112-177 (SEQ ID NO:314), DOM9-112-178 (SEQ ID NO:315), DOM9-112-179 (SEQ ID NO:316), DOM9-112-180 (SEQ ID NO:317), DOM9-112-181 (SEQ ID NO:318), DOM9-112-182 (SEQ ID NO:319), DOM9-112-183 (SEQ ID NO:320), DOM9-112-184 (SEQ ID NO:321), DOM9-112-185 (SEQ ID NO:322), DOM9-112-186 (SEQ ID NO:323), DOM9-112-187 (SEQ ID NO:324), DOM9-112-188 (SEQ ID NO:325), DOM9-112-189 (SEQ ID NO:326), DOM9-112-190 (SEQ ID NO:327), DOM9-112-191 (SEQ ID NO:328), DOM9-112-192 (SEQ ID NO:329), DOM9-112-193 (SEQ ID NO:330), DOM9-112-194 (SEQ ID NO:331), DOM9-112-195 (SEQ ID NO:332), DOM9-112-196 (SEQ ID NO:333), DOM9-112-197 (SEQ ID NO:334), DOM9-112-198 (SEQ ID NO:335), DOM9-112-199 (SEQ ID NO:336), DOM9-112-200 (SEQ ID NO:337), DOM9-112-201 (SEQ ID NO:338), DOM9-112-202 (SEQ ID NO:339), DOM9-120 (SEQ ID NO:340), DOM9-121 (SEQ ID NO:341), DOM9-122 (SEQ ID NO:342), DOM9-123 (SEQ ID NO:343), DOM9-124 (SEQ ID NO:344), DOM9-125 (SEQ ID NO:345), DOM9-128 (SEQ ID NO:346), DOM9-134 (SEQ ID NO:347), DOM9-136 (SEQ ID NO:348), DOM9-26 (SEQ ID NO:500), DOM9-35 (SEQ ID NO:501), DOM9-36 (SEQ ID NO:502), DOM9-37 (SEQ ID NO:503), DOM9-38 (SEQ ID NO:504), DOM9-39 (SEQ ID NO:505), DOM9-40 (SEQ ID NO:506), DOM9-41 (SEQ ID NO:507), DOM9-43 (SEQ ID NO:508), DOM9-44 (SEQ ID NO:509), DOM9-44-500 (SEQ ID NO:510), DOM9-44-501 (SEQ ID NO:511), DOM9-44-502 (SEQ ID NO:512), DOM9-44-503 (SEQ ID NO:513), DOM9-44-504 (SEQ ID NO:514), DOM9-44-505 (SEQ ID NO:515), DOM9-44-506 (SEQ ID NO:516), DOM9-44-507 (SEQ ID NO:517), DOM9-44-509 (SEQ ID NO:518), DOM9-44-510 (SEQ ID NO:519), DOM9-44-511 (SEQ ID NO:520), DOM9-44-512 (SEQ ID NO:521), DOM9-44-513 (SEQ ID NO:522), DOM9-44-514 (SEQ ID NO:523), DOM9-44-515 (SEQ ID NO:524), DOM9-44-516 (SEQ ID NO:525), DOM9-44-517 (SEQ ID NO:526), DOM9-44-518 (SEQ ID NO:527), DOM9-44-519 (SEQ ID NO:528), DOM9-44-520 (SEQ ID NO:529), DOM9-44-521 (SEQ ID NO:530), DOM9-44-522 (SEQ ID NO:531), DOM9-44-523 (SEQ ID NO:532), DOM9-44-524 (SEQ ID NO:533), DOM9-44-525 (SEQ ID NO:534), DOM9-44-526 (SEQ ID NO:535), DOM9-44-527 (SEQ ID NO:536), DOM9-44-528 (SEQ ID NO:537), DOM9-44-529 (SEQ ID NO:538), DOM9-44-530 (SEQ ID NO:539), DOM9-44-531 (SEQ ID NO:540), DOM9-44-532 (SEQ ID NO:541), DOM9-44-533 (SEQ ID NO:542), DOM9-44-534 (SEQ ID NO:543), DOM9-44-535 (SEQ ID NO:544), DOM9-44-536 (SEQ ID NO:545), DOM9-44-537 (SEQ ID NO:546), DOM9-44-538 (SEQ ID NO:547), DOM9-44-539 (SEQ ID NO:548), DOM9-44-540 (SEQ ID NO:549), DOM9-44-541 (SEQ ID NO:550), DOM9-44-542 (SEQ ID NO:551), DOM9-44-543 (SEQ ID NO:552), DOM9-44-544 (SEQ ID NO:553), DOM9-44-545 (SEQ ID NO:554), DOM9-44-546 (SEQ ID NO:555), DOM9-44-547 (SEQ ID NO:556), DOM9-44-548 (SEQ ID NO:557), DOM9-44-549 (SEQ ID NO:558), DOM9-44-550 (SEQ ID NO:559), DOM9-44-551 (SEQ ID NO:560), DOM9-44-552 (SEQ ID NO:561), DOM9-44-553 (SEQ ID NO:562), DOM9-44-554 (SEQ ID NO:563), DOM9-44-555 (SEQ ID NO:564), DOM9-44-556 (SEQ ID NO:565), DOM9-44-557 (SEQ ID NO:566), DOM9-44-558 (SEQ ID NO:567), DOM9-44-559 (SEQ ID NO:568), DOM9-44-560 (SEQ ID NO:569), DOM9-44-561 (SEQ ID NO:570), DOM9-44-562 (SEQ ID NO:571), DOM9-44-563 (SEQ ID NO:572), DOM9-44-564 (SEQ ID NO:573), DOM9-44-565 (SEQ ID NO:574), DOM9-44-566 (SEQ ID NO:575), DOM9-44-625 (SEQ ID NO:576), DOM9-44-626 (SEQ ID NO:577), DOM9-44-627 (SEQ ID NO:578), DOM9-44-628 (SEQ ID NO:579), DOM9-44-629 (SEQ ID NO:580), DOM9-44-630 (SEQ ID NO:581), DOM9-44-631 (SEQ ID NO:582), DOM9-44-632 (SEQ ID NO:583), DOM9-44-633 (SEQ ID NO:584), DOM9-44-634 (SEQ ID NO:585), DOM9-44-636 (SEQ ID NO:586), DOM9-44-637 (SEQ ID NO:587), DOM9-44-639 (SEQ ID NO:588), DOM9-44-640 (SEQ ID NO:589), DOM9-44-641 (SEQ ID NO:590), DOM9-44-642 (SEQ ID NO:591), DOM9-44-643 (SEQ ID NO:592), DOM9-44-644 (SEQ ID NO:593), DOM9-45 (SEQ ID NO:594), DOM9-46 (SEQ ID NO:595), DOM9-47 (SEQ ID NO:596), DOM9-48 (SEQ ID NO:597), DOM9-143 (SEQ ID NO:598), DOM9-144 (SEQ ID NO:599), DOM9-146 (SEQ ID NO:600), DOM9-152 (SEQ ID NO:601), DOM9-155 (SEQ ID NO:602), DOM9-155-001 (SEQ ID NO:603), DOM9-155-3 (SEQ ID NO:604), DOM9-155-5 (SEQ ID NO:605), DOM9-155-8 (SEQ ID NO:606), DOM9-155-9 (SEQ ID NO:607), DOM9-155-11 (SEQ ID NO:608), DOM9-155-13 (SEQ ID NO:609), DOM9-155-14 (SEQ ID NO:610), DOM9-155-17 (SEQ ID NO:611), DOM9-155-19 (SEQ ID NO:612), DOM9-155-20 (SEQ ID NO:613), DOM9-155-22 (SEQ ID NO:614), DOM9-155-23 (SEQ ID NO:615), DOM9-155-24 (SEQ ID NO:616), DOM9-155-25 (SEQ ID NO:617), DOM9-155-26 (SEQ ID NO:618), DOM9-155-27 (SEQ ID NO:619), DOM9-155-28 (SEQ ID NO:620), DOM9-155-29 (SEQ ID NO:621), DOM9-155-30 (SEQ ID NO:622), DOM9-155-31 (SEQ ID NO:623), DOM9-155-32 (SEQ ID NO:624), DOM9-155-33 (SEQ ID NO:625), DOM9-155-34 (SEQ ID NO:626), DOM9-155-35 (SEQ ID NO:627), DOM9-155-36 (SEQ ID NO:628), DOM9-155-37 (SEQ ID NO:629), DOM9-155-38 (SEQ ID NO:630), DOM9-155-39 (SEQ ID NO:631), DOM9-155-41 (SEQ ID NO:632), DOM9-155-42 (SEQ ID NO:633), DOM9-155-43 (SEQ ID NO:634), DOM9-155-44 (SEQ ID NO:635), DOM9-155-45(SEQ ID NO:636), DOM9-155-46 (SEQ ID NO:637), DOM9-155-47 (SEQ ID NO:638), DOM9-155-48 (SEQ ID NO:639), DOM9-155-49 (SEQ ID NO:640), DOM9-155-50 (SEQ ID NO:641), DOM9-155-51 (SEQ ID NO:642), DOM9-155-52 (SEQ ID NO:643), DOM9-155-53 (SEQ ID NO:644), DOM9-158 (SEQ ID NO:645), DOM9-160 (SEQ ID NO:646), DOM9-161 (SEQ ID NO:647), DOM9-162 (SEQ ID NO:648), DOM9-163 (SEQ ID NO:649) and DOM9-164 (SEQ ID NO:650).

[0011] Additionally, or in other embodiments, the ligand can comprise a protein moiety that has a binding site with binding specificity for IL-13 that competes for binding to IL-13 with IL-13Rα1, an IL-13-binding portion of IL-13Rα1, IL-13Rα2, an IL-13-binding portion of IL-13Rα2 or an anti-IL-13 domain antibody (dAb). The ligand can comprise a protein moiety that has a binding site with binding specificity for IL-13 (e.g., an immunoglobulin single variable domain) that competes for binding to IL-13 with an anti-IL-13 domain antibody (dAb) selected from the anti-1-13 dAbs disclosed herein (i.e., DOM10-53 (SEQ ID NO:967), DOM10-53-1 (SEQ ID NO:968), DOM10-53-2 (SEQ ID NO:969), DOM10-53-3 (SEQ ID NO:970), DOM10-53-4 (SEQ ID NO:971), DOM10-53-5 (SEQ ID NO:972), DOM10-53-6 (SEQ ID NO:973), DOM10-53-7 (SEQ ID NO:974), DOM10-53-8 (SEQ ID NO:975), DOM10-53-9 (SEQ ID NO:976), DOM10-53-10 (SEQ ID NO:977), DOM10-53-11 (SEQ ID NO:978), DOM10-53-12 (SEQ ID NO:979), DOM10-5313 (SEQ ID NO:980), DOM10-53-14 (SEQ ID NO:981), DOM10-53-15 (SEQ ID NO:982), DOM10-53-16 (SEQ ID NO:983), DOM10-53-17 (SEQ ID NO:984), DOM10-53-18 (SEQ ID NO:985), DOM10-53-19 (SEQ ID NO:986), DOM10-53-20 (SEQ ID NO:987), DOM10-53-21 (SEQ ID NO:988), DOM10-53-122 (SEQ ID NO:989), DOM10-53-123 (SEQ ID NO:990), DOM10-53-24 (SEQ ID NO:991), DOM10-53-25 (SEQ ID NO:992), DOM10-53-26 (SEQ ID NO:993), DOM10-53-27 (SEQ ID NO:994), DOM10-53-28 (SEQ ID NO:995), DOM10-53-29 (SEQ ID NO:996), DOM10-53-30 (SEQ ID NO:997), DOM10-53-31 (SEQ ID NO:998), DOM10-53-32 (SEQ ID NO:1999), DOM10-53-43 (SEQ ID NO:1000), DOM10-53-44 (SEQ ID NO:1001), DOM10-53-45 (SEQ ID NO:1002), DOM10-53-46 (SEQ ID NO:1003), DOM10-53-47 (SEQ ID NO:1004), DOM10-53-48 (SEQ ID NO:1005), DOM10-53-49 (SEQ ID NO:1006), DOM10-53-50 (SEQ ID NO:1007), DOM10-53-51 (SEQ ID NO:1008), DOM10-53-52 (SEQ ID NO:1009), DOM10-53-53 (SEQ ID NO:1010), DOM10-53-54 (SEQ ID NO:1011), DOM10-53-55 (SEQ ID NO:1012), DOM10-53-56 (SEQ ID NO:1013), DOM10-53-57 (SEQ ID NO:1014), DOM10-53-59 (SEQ ID NO:1015), DOM10-53-60 (SEQ ID NO:1016), DOM10-53-61 (SEQ ID NO:1017), DOM10-53-62 (SEQ ID NO:1018), DOM10-53-63 (SEQ ID NO:1019), DOM10-53-64 (SEQ ID NO:1020), DOM10-53-65 (SEQ ID NO:1021), DOM10-53-66 (SEQ ID NO:1022), DOM10-53-67 (SEQ ID NO:1023), DOM10-53-68 (SEQ ID NO:1024), DOM10-53-69 (SEQ ID NO:1025), DOM10-53-70 (SEQ ID NO:1026), DOM10-53-71 (SEQ ID NO:1027), DOM10-53-72 (SEQ ID NO:1028), DOM10-53-73 (SEQ ID NO:1029), DOM10-53-74 (SEQ ID NO:1030), DOM10-53-75 (SEQ ID NO:1031), DOM10-53-76 (SEQ ID NO:1032), DOM10-53-77 (SEQ ID NO:1033), DOM10-53-78 (SEQ ID NO:1034), DOM10-53-79 (SEQ ID NO:1035), DOM10-53-80 (SEQ ID NO:1036), DOM10-53-81 (SEQ ID NO:1037), DOM10-53-82 (SEQ ID NO:1038), DOM10-53-83 (SEQ ID NO:1039), DOM10-53-84 (SEQ ID NO:1040), DOM10-53-85 (SEQ ID NO:1041), DOM10-53-86 (SEQ ID NO:1042), DOM10-53-87 (SEQ ID NO:1043), DOM10-53-88 (SEQ ID NO:1044), DOM10-53-89 (SEQ ID NO:1045), DOM10-53-91 (SEQ ID NO:1046), DOM10-53-92 (SEQ ID NO:1047), DOM10-53-93 (SEQ ID NO:1048), DOM10-53-94 (SEQ ID NO:1049), DOM10-53-95 (SEQ ID NO:1050), DOM10-53-96 (SEQ ID NO:1051), DOM10-53-97 (SEQ ID NO:1052), DOM10-53-98 (SEQ ID NO:1053), DOM10-53-99 (SEQ ID NO:1054), DOM10-53-100 (SEQ ID NO:1055), DOM10-53-103 (SEQ ID NO:1056), DOM10-53-105 (SEQ ID NO:1057), DOM10-53-106 (SEQ ID NO:1058), DOM10-53-108 (SEQ ID NO:1059), DOM10-53-110 (SEQ ID NO:1060), DOM10-53-111 (SEQ ID NO:1061), DOM10-53-112 (SEQ ID NO:10632), DOM10-53-114 (SEQ ID NO:1063), DOM10-53-115 (SEQ ID NO:1064), DOM10-53-116 (SEQ ID NO:1065), DOM10-53-117 (SEQ ID NO:1066), DOM10-53-119 (SEQ ID NO:1067), DOM10-53-120 (SEQ ID NO:1068), DOM10-53-122 (SEQ ID NO:1069), DOM10-53-201 (SEQ ID NO:1070), DOM10-53-203 (SEQ ID NO:1071), DOM10-53-204 (SEQ ID NO:1072), DOM10-53-205 (SEQ ID NO:1073), DOM10-53-206 (SEQ ID NO:1074), DOM10-53-207 (SEQ ID NO:1075), DOM10-53-208 (SEQ ID NO:1076), DOM10-53-209 (SEQ ID NO:1077), DOM10-53-210 (SEQ ID NO:1078), DOM10-53-211 (SEQ ID NO:1079), DOM10-53-213 (SEQ ID NO:1080), DOM10-53-214 (SEQ ID NO:1081), DOM10-53-215 (SEQ ID NO:1082), DOM10-53-216 (SEQ ID NO:1083), DOM10-53-217 (SEQ ID NO:1084), DOM10-53-1218 (SEQ ID NO:1085), DOM10-53-219 (SEQ ID NO:1086), DOM10-53-220 (SEQ ID NO:1087), DOM10-53-221 (SEQ ID NO:1088), DOM10-53-222 (SEQ ID NO:1089), DOM10-53-223 (SEQ ID NO:1090), DOM10-53-224 (SEQ ID NO:1091), DOM10-53-225 (SEQ ID NO:1092), DOM10-53-226 (SEQ ID NO:1093), DOM10-53-227 (SEQ ID NO:1094), DOM10-53-228 (SEQ ID NO:1095), DOM10-53-229 (SEQ ID NO:1096), DOM10-53-230 (SEQ ID NO:1097), DOM10-53-231 (SEQ ID NO:1098), DOM10-53-232 (SEQ ID NO:1099), DOM10-53-233 (SEQ ID NO:1100), DOM10-53-234 (SEQ ID NO:1101), DOM10-53-235 (SEQ ID NO:1102), DOM10-53-236 (SEQ ID NO:1103), DOM10-53-237 (SEQ ID NO:1104), DOM10-53-238 (SEQ ID NO:1105), DOM10-53-239 (SEQ ID NO:1106), DOM10-53-240 (SEQ ID NO:1107), DOM10-53-241 (SEQ ID NO:1108), DOM10-53-242 (SEQ ID NO:1109), DOM10-53-243 (SEQ ID NO:1110), DOM10-53-244 (SEQ ID NO:1111), DOM10-53-245 (SEQ ID NO:1112), DOM10-53-246 (SEQ ID NO:1113), DOM10-53-247 (SEQ ID NO:1114), DOM10-53-248 (SEQ ID NO:1115), DOM10-53-249 (SEQ ID NO:1116), DOM10-53-250 (SEQ ID NO:1117), DOM10-53-251 (SEQ ID NO:1118), DOM10-53-252 (SEQ ID NO:1119), DOM10-53-253 (SEQ ID NO:1120), DOM10-53-254 (SEQ ID NO:1121), DOM10-53-255 (SEQ ID NO:1122), DOM10-53-256 (SEQ ID NO:1123), DOM10-53-257 (SEQ ID NO:1124), DOM10-53-258 (SEQ ID NO:1125), DOM10-53-259 (SEQ ID NO:1126), DOM10-53-260 (SEQ ID NO:1127), DOM10-53-261 (SEQ ID NO:1128), DOM10-53-262 (SEQ ID NO:1129), DOM10-53-263 (SEQ ID NO: 3130), DOM10-53-264 (SEQ ID NO:1131), DOM10-53-265 (SEQ ID NO:1132), DOM10-53-266 (SEQ ID NO:1133), DOM10-53-267 (SEQ ID NO:1134), DOM10-53-268 (SEQ ID NO:1135), DOM10-53-269 (SEQ ID NO:1136), DOM10-53-270 (SEQ ID NO:1137), DOM10-53-271 (SEQ ID NO:1138), DOM10-53-272 (SEQ ID NO:1139), DOM10-53-273 (SEQ ID NO:1140), DOM10-53-274 (SEQ ID NO:1141), DOM10-53-275 (SEQ ID NO:1142), DOM10-53-276 (SEQ ID NO:1143), DOM10-53-277 (SEQ ID NO:1144), DOM10-53-278 (SEQ ID NO:1145), DOM10-53-279 (SEQ ID NO:1146), DOM10-53-280 (SEQ ID NO:1147), DOM10-53-281 (SEQ ID NO:1148), DOM10-53-282 (SEQ ID NO:1149), DOM10-53-283 (SEQ ID NO:1150), DOM10-53-284 (SEQ ID NO:1151), DOM10-53-285 (SEQ ID NO:1152), DOM10-53-286 (SEQ ID NO:1153), DOM10-53-287 (SEQ ID NO:1154), DOM10-53-288 (SEQ ID NO:1155), DOM10-53-289 (SEQ ID NO:1156), DOM10-53-290 (SEQ ID NO:1157), DOM10-53-291 (SEQ ID NO:1158), DOM10-53-292 (SEQ ID NO:1159), DOM10-53-293 (SEQ ID NO:1160), DOM10-53-294 (SEQ ID NO:1161), DOM10-53-295 (SEQ ID NO:1162), DOM10-53-296 (SEQ ID NO:1163), DOM10-53-297 (SEQ ID NO:1164), DOM10-53-298 (SEQ ID NO:1165), DOM10-53-299 (SEQ ID NO:1166), DOM10-53-300 (SEQ ID NO:1167), DOM10-53-301 (SEQ ID NO:1168), DOM10-53-302 (SEQ ID NO:1169), DOM10-53-303 (SEQ ID NO:1170), DOM10-53-304 (SEQ ID NO:1171), DOM10-53-305 (SEQ ID NO:1172), DOM10-53-306 (SEQ ID NO:1173), DOM10-53-307 (SEQ ID NO:1174), DOM10-53-308 (SEQ ID NO:1175), DOM10-53-309 (SEQ ID NO:1176), DOM10-53-310 (SEQ ID NO:11787), DOM10-53-311 (SEQ ID NO:1178), DOM10-53-312 (SEQ ID NO:1179), DOM10-53-314 (SEQ ID NO:1180), DOM10-53-315 (SEQ ID NO:1181), DOM10-53-316 (SEQ ID NO:1182), DOM10-53-317 (SEQ ID NO:1183), DOM10-53-318 (SEQ ID NO:1184), DOM10-53-319 (SEQ ID NO:1185), DOM10-53-320 (SEQ ID NO:1186), DOM10-53-321 (SEQ ID NO:1187), DOM10-53-322 (SEQ ID NO:1188), DOM10-53-323 (SEQ ID NO:1189), DOM10-53-324 (SEQ ID NO:1190), DOM10-53-325 (SEQ ID NO:1191), DOM10-53-326 (SEQ ID NO:1192), DOM10-53-327 (SEQ ID NO:1193), DOM10-53-328 (SEQ ID NO:1194), DOM10-53-329 (SEQ ID NO:1195), DOM10-53-330 (SEQ ID NO:1196), DOM10-53-331 (SEQ ID NO:1197), DOM10-53-333 (SEQ ID NO:1198), DOM10-53-334 (SEQ ID NO:1199), DOM10-53-336 (SEQ ID NO:1200), DOM10-53-337 (SEQ ID NO:1201), DOM10-53-338 (SEQ ID NO:1202), DOM10-53-339 (SEQ ID NO:1203), DOM10-53-340 (SEQ ID NO:1204), DOM10-53-341 (SEQ ID NO:1205), DOM10-53-342 (SEQ ID NO:1206), DOM10-53-343 (SEQ ID NO:1207), DOM10-53-344 (SEQ ID NO:1208), DOM10-53-345 (SEQ ID NO:1209), DOM10-53-346 (SEQ ID NO:1210), DOM10-53-347 (SEQ ID NO:1211), DOM10-53-348 (SEQ ID NO:1212), DOM10-53-349 (SEQ ID NO:1213), DOM10-53-350 (SEQ ID NO:1214), DOM10-53-351 (SEQ ID NO:1215), DOM10-53-352 (SEQ ID NO:1216), DOM10-53-353 (SEQ ID NO:1217), DOM10-53-354 (SEQ ID NO:1218), DOM10-53-355 (SEQ ID NO: 1219), DOM10-53-356 (SEQ ID NO:1220), DOM10-53-357 (SEQ ID NO:1221), DOM10-53-358 (SEQ ID NO:1222), DOM10-53-359 (SEQ ID NO:1223), DOM10-53-360 (SEQ ID NO:1224), DOM10-53-361 (SEQ ID NO:1225), DOM10-53-362 (SEQ ID NO:1226), DOM10-53-363 (SEQ ID NO:1227), DOM10-53-364 (SEQ ID NO:1228), DOM10-53-365 (SEQ ID NO:1229), DOM10-53-366 (SEQ ID NO:1230), DOM10-53-367 (SEQ ID NO:1231), DOM10-53-368 (SEQ ID NO:1232), DOM10-53-369 (SEQ ID NO:1233), DOM10-53-370 (SEQ ID NO:1234), DOM10-53-371 (SEQ ID NO:1235), DOM10-53-372 (SEQ ID NO:1236), DOM10-53-373 (SEQ ID NO:1237), DOM10-53-374 (SEQ ID NO:1238), DOM10-53-375 (SEQ ID NO:1239), DOM10-53-376 (SEQ ID NO:1240), DOM10-53-377 (SEQ ID NO:1241), DOM10-53-378 (SEQ ID NO:1242), DOM10-53-379 (SEQ ID NO:1243), DOM10-53-380 (SEQ ID NO:1244), DOM10-53-381 (SEQ ID NO:1245), DOM10-53-382 (SEQ ID NO:1246), DOM10-53-383 (SEQ ID NO:1247), DOM10-53-384 (SEQ ID NO:1248), DOM10-53-385 (SEQ ID NO:1249), DOM10-53-386 (SEQ ID NO:1250), DOM10-53-387 (SEQ ID NO:1251), DOM10-53-388 (SEQ ID NO:1252), DOM10-53-389 (SEQ ID NO:1253), DOM10-53-390 (SEQ ID NO:1254), DOM10-53-391 (SEQ ID NO:1255), DOM10-53-392 (SEQ ID NO:1256), DOM10-53-393 (SEQ ID NO:1257), DOM10-53-394 (SEQ ID NO:1258), DOM10-53-395 (SEQ ID NO:1259), DOM10-53-396 (SEQ ID NO:1260), DOM10-53-400 (SEQ ID NO:1261), DOM10-53-401 (SEQ ID NO:1262), DOM10-53-402 (SEQ ID NO:1263), DOM10-53-403 (SEQ ID NO:1264), DOM10-53-404 (SEQ ID NO:1265), DOM10-53-405 (SEQ ID NO:1266), DOM10-53-406 (SEQ ID NO:1267), DOM10-53-407 (SEQ ID NO:1268), DOM10-53-408 (SEQ ID NO:1269), DOM10-53-409 (SEQ ID NO:1270), DOM10-53-410 (SEQ ID NO:1271), DOM10-53-411 (SEQ ID NO:1272), DOM10-53-412 (SEQ ID NO:1273), DOM10-53-413 (SEQ ID NO:1274), DOM10-53-414 (SEQ ID NO:1275), DOM10-53-415 (SEQ ID NO:1276), DOM10-53-416 (SEQ ID NO:1277), DOM10-53-417 (SEQ ID NO:1278), DOM10-53-418 (SEQ ID NO:1279), DOM10-53-419 (SEQ ID NO:1280), DOM10-53-420 (SEQ ID NO:1281), DOM10-53-421 (SEQ ID NO:1282), DOM10-168 (SEQ ID NO:1508), DOM10-169 (SEQ ID NO:1509), DOM10-176 (SEQ ID NO:1510), DOM10-176-1 (SEQ ID NO:1511), DOM10-176-2 (SEQ ID NO:1512), DOM10-173 (SEQ ID NO:1513), DOM10-176-4 (SEQ ID NO:1514), DOM10-176-5 (SEQ ID NO:1515), DOM10-176-6 (SEQ ID NO:1516), DOM10-176-23 (SEQ ID NO:1517), DOM10-176-24 (SEQ ID NO:1518), DOM10-176-25 (SEQ ID NO:1519), DOM10-176-26 (SEQ ID NO:1520), DOM10-176-27 (SEQ ID NO:1521), DOM10-176-28 (SEQ ID NO:1522), DOM10-176-29 (SEQ ID NO:1523), DOM10-176-30 (SEQ ID NO:1524), DOM10-176-31 (SEQ ID NO:1525), DOM10-176-32 (SEQ ID NO:1526), DOM10-176-33 (SEQ ID NO:1527), DOM10-176-34 (SEQ ID NO:1528), DOM10-176-35 (SEQ ID NO:1529), DOM10-176-36 (SEQ ID NO:1530), DOM10-176-37 (SEQ ID NO:1531), DOM10-176-38 (SEQ ID NO:1532), DOM10-176-39 (SEQ ID NO:1533), DOM10-176-40 (SEQ ID NO:1534), DOM10-176-101 (SEQ ID NO:1535), DOM10-176-102 (SEQ ID NO:1536), DOM10-176-103 (SEQ ID NO:1537), DOM10-176-104 (SEQ ID NO:1538), DOM10-176-105 (SEQ ID NO:1539), DOM10-176-106 (SEQ ID NO:1540), DOM10-176-107 (SEQ ID NO:1541), DOM10-176-108 (SEQ ID NO:1542), DOM10-176-109 (SEQ ID NO:1543), DOM10-176-110 (SEQ ID NO:1544), DOM10-176-111 (SEQ ID NO:1545), DOM10-176-112 (SEQ ID NO:1546), DOM10-176-113 (SEQ ID NO:1547), DOM10-176-114 (SEQ ID NO:1548), DOM10-176-115 (SEQ ID NO:1549), DOM10-176-116 (SEQ ID NO:1550), DOM10-176-117 (SEQ ID NO:1551), DOM10-176-500 (SEQ ID NO:1552), DOM10-176-501 (SEQ ID NO:1553), DOM10-176-502 (SEQ ID NO:1554), DOM10-176-503 (SEQ ID NO:1555), DOM10-176-504 (SEQ ID NO:1556), DOM10-176-505 (SEQ ID NO:1557), DOM10-176-506 (SEQ ID NO:1558), DOM10-176-507 (SEQ ID NO:1559), DOM10-176-508 (SEQ ID NO:1560), DOM10-176-509 (SEQ ID NO:1561), DOM10-176-510 (SEQ ID NO:1562), DOM10-176-511 (SEQ ID NO:1563), DOM10-176-512 (SEQ ID NO:1564), DOM10-176-513 (SEQ ID NO:1565), DOM10-176-514 (SEQ ID NO:1566), DOM10-176-515 (SEQ ID NO:1567), DOM10-176-516 (SEQ ID NO:1568), DOM10-176-517 (SEQ ID NO:1569), DOM10-176-518 (SEQ ID NO:1570), DOM10-176-519 (SEQ ID NO:1571), DOM10-176-520 (SEQ ID NO:1572), DOM10-176-521 (SEQ ID NO:1573), DOM10-176-522 (SEQ ID NO:1574), DOM10-176-523 (SEQ ID NO:1575), DOM10-176-524 (SEQ ID NO:1576), DOM10-176-525 (SEQ ID NO:1577), DOM10-176-526 (SEQ ID NO:1578), DOM10-176-527 (SEQ ID NO:1579), DOM10-176-528 (SEQ ID NO:1580), DOM10-176-529 (SEQ ID NO:1581), DOM10-176-530 (SEQ ID NO:1582), DOM10-176-531 (SEQ ID NO:1583), DOM10-176-532 (SEQ ID NO:1584), DOM10-176-533 (SEQ ID NO:1585), DOM10-176-534 (SEQ ID NO:1586), DOM10-176-535 (SEQ ID NO:1587), DOM10-176-536 (SEQ ID NO:1588), DOM10-176-537 (SEQ ID NO:1589), DOM10-176-538 (SEQ ID NO:1590), DOM10-176-539 (SEQ ID NO:1591), DOM10-176-540 (SEQ ID NO:1592), DOM10-176-541 (SEQ ID NO:1593), DOM10-176-542 (SEQ ID NO:1594), DOM10-176-543 (SEQ ID NO:1595), DOM10-176-544 (SEQ ID NO:1596), DOM10-176-545 (SEQ ID NO:1597), DOM10-176-546 (SEQ ID NO:1598), DOM10-176-547 (SEQ ID NO:1599), DOM10-176-548 (SEQ ID NO:1600), DOM10-176-549 (SEQ ID NO:1601), DOM10-176-550 (SEQ ID NO:1602), DOM10-176-551 (SEQ ID NO:1603), DOM10-176-552 (SEQ ID NO:1604), DOM10-176-553 (SEQ ID NO:1605), DOM10-176-554 (SEQ ID NO:1606), DOM10-176-555 (SEQ ID NO:1607), DOM10-176-556 (SEQ ID NO:1608), DOM10-176-557 (SEQ ID NO:1609), DOM10-176-558 (SEQ ID NO:1610), DOM10-176-559 (SEQ ID NO:1611), DOM10-176-560 (SEQ ID NO:1612), DOM10-176-561 (SEQ ID NO:1613), DOM10-176-562 (SEQ ID NO:1614), DOM10-176-563 (SEQ ID NO:1615), DOM10-176-564 (SEQ ID NO:1616), DOM10-176-565 (SEQ ID NO:1617), DOM10-176-566 (SEQ ID NO:1618), DOM10-176-567 (SEQ ID NO:1619), DOM10-176-568 (SEQ ID NO:1620), DOM10-176-569 (SEQ ID NO:1621), DOM10-176-570 (SEQ ID NO:1622), DOM10-176-571 (SEQ ID NO:1623), DOM10-176-572 (SEQ ID NO:1624), DOM10-176-573 (SEQ ID NO:1625), DOM10-176-574 (SEQ ID NO:1626), DOM10-176-575 (SEQ ID NO:1627), DOM10-176-576 (SEQ ID NO:1628), DOM10-176-577 (SEQ ID NO:1629), DOM10-176-578 (SEQ ID NO:1630), DOM10-176-579 (SEQ ID NO:1631), DOM10-176-580 (SEQ ID NO:1632), DOM10-176-581 (SEQ ID NO:1633), DOM10-176-582 (SEQ ID NO:1634), DOM10-176-583 (SEQ ID NO:1635), DOM10-176-584 (SEQ ID NO:1636), DOM10-176-585 (SEQ ID NO:1637), DOM10-176-586 (SEQ ID NO:1638), DOM10-176-587 (SEQ ID NO:1639), DOM10-176-588 (SEQ ID NO:1640), DOM10-176-589 (SEQ ID NO:1641), DOM10-176-590 (SEQ ID NO:1642), DOM10-176-591 (SEQ ID NO:1643), DOM10-176-592 (SEQ ID NO:1644), DOM10-176-593 (SEQ ID NO:1645), DOM10-176-594 (SEQ ID NO:1646), DOM10-176-595 (SEQ ID NO:1647), DOM10-176-596 (SEQ ID NO:1648), DOM10-176-597 (SEQ ID NO:1649), DOM10-176-598 (SEQ ID NO:1650), DOM10-176-599 (SEQ ID NO:1651), DOM10-176-600 (SEQ ID NO:1652), DOM10-176-601 (SEQ ID NO:1653), DOM10-176-602 (SEQ ID NO:1654), DOM10-176-603 (SEQ ID NO:1655), DOM10-176-604 (SEQ ID NO:1656), DOM10-176-605 (SEQ ID NO:1657), DOM10-176-606 (SEQ ID NO:1658), DOM10-176-607 (SEQ ID NO:1659), DOM10-176-608 (SEQ ID NO:1660), DOM10-176-609 (SEQ ID NO:1661), DOM10-176-610 (SEQ ID NO:1662), DOM10-176-611 (SEQ ID NO:1663), DOM10-176-612 (SEQ ID NO:1664), DOM10-176-613 (SEQ ID NO:1665), DOM10-176-614 (SEQ ID NO:1666), DOM10-176-615 (SEQ ID NO:1667), DOM10-176-616 (SEQ ID NO:1668), DOM10-176-617 (SEQ ID NO:1669), DOM10-176-618 (SEQ ID NO:1670), DOM10-176-619 (SEQ ID NO:1671), DOM10-176-620 (SEQ ID NO:1672), DOM10-176-621 (SEQ ID NO:1673), DOM10-176-622 (SEQ ID NO:1674), DOM10-176-623 (SEQ ID NO:1675), DOM10-176-624 (SEQ ID NO:1676), DOM10-176-625 (SEQ ID NO:1677), DOM10-176-626 (SEQ ID NO:1678), DOM10-176-627 (SEQ ID NO:1679), DOM10-176-628 (SEQ ID NO:1680), DOM10-176-629 (SEQ ID NO:1681), DOM10-176-630 (SEQ ID NO:1682), DOM10-176-631 (SEQ ID NO:1683), DOM10-176-632 (SEQ ID NO:1684), DOM10-176-633 (SEQ ID NO:1685), DOM10-176-634 (SEQ ID NO:1686), DOM10-176-635 (SEQ ID NO:1687), DOM10-176-636 (SEQ ID NO:1688), DOM10-176-637 (SEQ ID NO:1689), DOM10-176-638 (SEQ ID NO:1690), DOM10-176-639 (SEQ ID NO:1691), DOM10-176-640 (SEQ ID NO:1692), DOM10-176-641 (SEQ ID NO:1693), DOM10-176-643 (SEQ ID NO:1694), DOM10-176-644 (SEQ ID NO:1695), DOM10-176-645 (SEQ ID NO:1696), DOM10-176-646 (SEQ ID NO:1697), DOM10-176-647 (SEQ ID NO:1698), DOM10-176-648 (SEQ ID NO:1699), DOM10-176-649 (SEQ ID NO:1700), DOM10-176-650 (SEQ ID NO:1701), DOM10-176-651 (SEQ ID NO:1702), DOM10-176-652 (SEQ ID NO:1703), DOM10-176-653 (SEQ ID NO:1704), DOM10-176-654 (SEQ ID NO:1705), DOM10-176-655 (SEQ ID NO:1706), DOM10-176-656 (SEQ ID NO:1707), DOM10-176-657 (SEQ ID NO:1708), DOM10-176-658 (SEQ ID NO:1709), DOM10-176-659 (SEQ ID NO:1710), DOM10-176-660 (SEQ ID NO:1711), DOM10-176-661 (SEQ ID NO:1712), DOM10-176-662 (SEQ ID NO:1713), DOM10-176-663 (SEQ ID NO:1714), DOM10-176-664 (SEQ ID NO:1715), DOM10-176-665 (SEQ ID NO:1716), DOM10-176-666 (SEQ ID NO:1717), DOM10-176-667 (SEQ ID NO:1718), DOM10-176-668 (SEQ ID NO:1719), DOM10-176-669 (SEQ ID NO:1720), DOM10-176-670 (SEQ ID NO:1721), DOM10-176-671 (SEQ ID NO:1722), DOM10-176-672 (SEQ ID NO:1723), DOM10-176-673 (SEQ ID NO:1724), DOM10-176-674 (SEQ ID NO:1725), DOM10-176-675 (SEQ ID NO:1726), DOM10-253 (SEQ ID NO:1727), DOM10-255 (SEQ ID NO:1728), DOM10-272 (SEQ ID NO:1729), DOM10-307 (SEQ ID NO:1730), DOM10-319 (SEQ ID NO:1731) and DOM10-319-1 (SEQ ID NO:1732)).

[0012] The ligand can also comprise a protein moiety that has a binding site with binding specificity for IL-13 (e.g., an immunoglobulin single variable domain) that competes for binding to IL-13 with an anti-IL-13 domain antibody (dAb) selected from the group consisting of DOM10-236 (SEQ ID NO:2129), DOM10-238 (SEQ ID NO:2130), DOM10-241 (SEQ ID NO:2131), DOM10-245 (SEQ ID NO:2132), DOM10-249 (SEQ ID NO:2133), DOM10-250 (SEQ ID NO:2134), DOM10-251 (SEQ ID NO:2135), DOM10-254 (SEQ ID NO:2136), DOM10-256 (SEQ ID NO:2137), DOM10-259 (SEQ ID NO:2138), DOM10-260 (SEQ ID NO:2139), DOM10-261 (SEQ ID NO:2140), DOM10-263 (SEQ ID NO:2141), DOM10-264 (SEQ ID NO:2142), DOM10-273 (SEQ ID NO:2143), DOM10-278 (SEQ ID NO:2144), DOM10-279 (SEQ ID NO:2145), DOM10-281 (SEQ ID NO:2146), DOM10-282 (SEQ ID NO:2147), DOM10-283 (SEQ ID NO:2148), DOM10-400 (SEQ ID NO:2149), DOM10-401 (SEQ ID NO:2150), DOM10-402 (SEQ ID NO:2151), DOM10-404 (SEQ ID NO:2152), DOM10-406 (SEQ ID NO:2153), DOM10-407 (SEQ ID NO:2154), DOM10-409 (SEQ ID NO:2155), DOM10-410 (SEQ ID NO:2156), DOM10-414 (SEQ ID NO:2157), DOM10-415 (SEQ ID NO:2158), DOM10-416 (SEQ ID NO:2159), DOM10-418 (SEQ ID NO:2160), DOM10-420 (SEQ ID NO:2161), DOM10-422 (SEQ ID NO:2162), DOM10-423 (SEQ ID NO:2163), DOM10-424 (SEQ ID NO:2164), DOM10-425 (SEQ ID NO:2165), DOM10-426 (SEQ ID NO:2166), DOM10-427 (SEQ ID NO:2167), DOM10-428 (SEQ ID NO:2168), DOM10-429 (SEQ ID NO:2169), DOM10-430 (SEQ ID NO:2170), DOM10-431 (SEQ ID NO:2171), DOM10-432 (SEQ ID NO:2172), DOM10-433 (SEQ ID NO:2173), DOM10-467 (SEQ ID NO:2174), DOM10-468 (SEQ ID NO:2175), DOM10-469 (SEQ ID NO:2176), DOM10-470 (SEQ ID NO:2177), DOM10-234 (SEQ ID NO:2178), DOM10-235 (SEQ ID NO:2179), DOM10-237 (SEQ ID NO:2180), DOM10-239 (SEQ ID NO:2181), DOM10-240 (SEQ ID NO:2182), DOM10-242 (SEQ ID NO:2183), DOM10-243 (SEQ ID NO:2184), DOM10-244 (SEQ ID NO:2185), DOM10-246 (SEQ ID NO:2186), DOM10-247 (SEQ ID NO:2187), DOM10-248 (SEQ ID NO:2188), DOM10-252 (SEQ ID NO:2189), DOM10-257 (SEQ ID NO:2190), DOM10-258 (SEQ ID NO:2191), DOM10-262 (SEQ ID NO:2192), DOM10-265 (SEQ ID NO:2193), DOM10-266 (SEQ ID NO:2194), DOM10-274 (SEQ ID NO:2195), DOM10-275 (SEQ ID NO:2196), DOM10-276 (SEQ ID NO:2197), DOM10-277 (SEQ ID NO:2198), DOM10-280 (SEQ ID NO:2199), DOM10-403 (SEQ ID NO:2200), DOM10-405 (SEQ ID NO:2201), DOM10-408 (SEQ ID NO:2202), DOM10-411 (SEQ ID NO:2203), DOM10-412 (SEQ ID NO:2204), DOM10-413 (SEQ ID NO:2205), DOM10-417 (SEQ ID NO:2206), DOM10-419 (SEQ ID NO:2207), DOM10-472 (SEQ ID NO:2208), DOM10-203 (SEQ ID NO:2209), DOM10-205 (SEQ ID NO:2210), DOM10-208 (SEQ ID NO:2211), DOM10-218 (SEQ ID NO:2212), DOM10-219 (SEQ ID NO:2213), DOM10-220 (SEQ ID NO:2214), DOM10-225 (SEQ ID NO:2215), DOM10-228 (SEQ ID NO:2216), DOM10-229 (SEQ ID NO:2217), DOM10-230 (SEQ ID NO:2218), DOM10-231 (SEQ ID NO:2219), DOM10-268 (SEQ ID NO:2220), DOM10-201 (SEQ ID NO:2221), DOM10-202 (SEQ ID NO:2222), DOM10-204 (SEQ ID NO:2223), DOM10-206 (SEQ ID NO:2224), DOM10-207 (SEQ ID NO:2225), DOM10-209 (SEQ ID NO:2226), DOM10-210 (SEQ ID NO:2227), DOM10-211 (SEQ ID NO:2228), DOM10-213 (SEQ ID NO:2229), DOM10-214 (SEQ ID NO:2230), DOM10-215 (SEQ ID NO:2231), DOM10-216 (SEQ ID NO:2232), DOM10-217 (SEQ ID NO:2233), DOM10-221 (SEQ ID NO:2234), DOM10-223 (SEQ ID NO:2235), DOM10-224 (SEQ ID NO:2236), DOM10-227 (SEQ ID NO:2237), DOM10-232 (SEQ ID NO:2238), DOM10-267 (SEQ ID NO:2239), DOM10-270 (SEQ ID NO:2240), DOM10-275-1 (SEQ ID NO:2241), DOM10-276-2 (SEQ ID NO:2242), DOM10-276-3 (SEQ ID NO:2243), DOM10-275-3 (SEQ ID NO:2244), DOM10-277-2 (SEQ ID NO:2245), DOM10-277-3 (SEQ ID NO:2246), DOM10-273-1 (SEQ ID NO:2247), DOM10-273-2 (SEQ ID NO:2248), DOM10-275-2 (SEQ ID NO:2249), DOM10-275-4 (SEQ ID NO:2250), DOM10-276-1 (SEQ ID NO:2251), DOM10-276-4 (SEQ ID NO:2252), DOM10-277-1 (SEQ ID NO:2253), DOM10-275-13 (SEQ ID NO:2254), DOM10-275-15 (SEQ ID NO:2255), DOM10-275-20 (SEQ ID NO:2256), DOM10-275-8 (SEQ ID NO:2257), DOM10-276-13 (SEQ ID NO:2258), DOM10-276-14 (SEQ ID NO:2259), DOM10-276-15 (SEQ ID NO:2260), DOM10-276-17 (SEQ ID NO:2261), DOM10-276-7 (SEQ ID NO:2262), DOM10-276-8 (SEQ ID NO:2263), DOM10-275-11 (SEQ ID NO:2264), DOM10-275-12 (SEQ ID NO:2265), DOM10-275-14 (SEQ ID NO:2266), DOM10-275-16 (SEQ ID NO:2267), DOM10-275-17 (SEQ ID NO:2268), DOM10-275-5 (SEQ ID NO:2269), DOM10-275-6 (SEQ ID NO:2270), DOM10-275-7 (SEQ ID NO:2271), DOM10-275-9 (SEQ ID NO:2272), DOM10-276-10 (SEQ ID NO:2273), DOM10-276-11 (SEQ ID NO:2274), DOM10-276-12 (SEQ ID NO:2275), DOM10-276-16 (SEQ ID NO:2276), DOM10-276-5 (SEQ ID NO:2277), DOM10-276-6 (SEQ ID NO:2278), DOM10-276-9 (SEQ ID NO:2279), DOM10-212 (SEQ ID NO:2280), DOM10-53-424 (SEQ ID NO:2281), DOM10-53-425 (SEQ ID NO:2282), DOM10-53-426 (SEQ ID NO:2283), DOM10-53-422 (SEQ ID NO:2284), DOM10-53-423 (SEQ ID NO:2285), DOM10-53-613 (SEQ ID NO:2286), DOM10-53-517 (SEQ ID NO:2287), DOM10-53-519 (SEQ ID NO:2288), DOM10-53-520 (SEQ ID NO:2289), DOM10-53-521 (SEQ ID NO:2290), DOM10-53-522 (SEQ ID NO:2291), DOM10-53-526 (SEQ ID NO:2292), DOM10-53-527 (SEQ ID NO:2293), DOM10-53-528 (SEQ ID NO:2294), DOM10-53-518 (SEQ ID NO:2295), DOM10-53-523 (SEQ ID NO:2296), DOM10-53-524 (SEQ ID NO:2297), DOM10-53-525 (SEQ ID NO:2298), DOM10-53-601 (SEQ ID NO:2299), DOM10-53-602 (SEQ ID NO:2300), DOM10-53-605 (SEQ ID NO:2301), DOM10-53-606 (SEQ ID NO:2302), DOM10-53-607 (SEQ ID NO:2303), DOM10-53-608 (SEQ ID NO:2304), DOM10-53-609 (SEQ ID NO:2305), DOM10-53-610 (SEQ ID NO:2306), DOM10-53-611 (SEQ ID NO:2307), DOM10-53-612 (SEQ ID NO:2308), DOM10-53-603 (SEQ ID NO:2309), DOM10-53-604 (SEQ ID NO:2310), DOM10-53-429 (SEQ ID NO:2311), DOM10-53-432 (SEQ ID NO:2312), DOM10-53-433 (SEQ ID NO:2313), DOM10-53-435 (SEQ ID NO:2314), DOM10-53-430 (SEQ ID NO:2315), DOM10-53-431 (SEQ ID NO:2316), DOM10-53-434 (SEQ ID NO:2317), DOM10-53-436 (SEQ ID NO:2318), DOM10-53-437 (SEQ ID NO:2319), DOM10-53-438 (SEQ ID NO:2320), DOM10-53-440 (SEQ ID NO:2321), DOM10-53-439 (SEQ ID NO:2322), DOM10-53-441 (SEQ ID NO:2323), DOM10-53-442 (SEQ ID NO:2324), DOM10-53-443 (SEQ ID NO:2325), DOM10-53-444 (SEQ ID NO:2326), DOM10-53-445 (SEQ ID NO:2327), DOM10-53-446 (SEQ ID NO:2328), DOM10-53-447 (SEQ ID NO:2329), DOM10-53-449 (SEQ ID NO:2330), DOM10-53-448 (SEQ ID NO:2331), DOM10-53-450 (SEQ ID NO:2332), DOM10-53-451 (SEQ ID NO:2333), DOM10-53-452 (SEQ ID NO:2334), DOM10-53-453 (SEQ ID NO:2335), DOM10-53-454 (SEQ ID NO:2336), DOM10-53-455 (SEQ ID NO:2337), DOM10-53-456 (SEQ ID NO:2338), DOM10-53-457 (SEQ ID NO:2339), DOM10-53-458 (SEQ ID NO:2340), DOM10-53-459 (SEQ ID NO:2341), DOM10-53-461 (SEQ ID NO:2342), DOM10-53-462 (SEQ ID NO:2343), DOM10-53-465 (SEQ ID NO:2344), DOM10-53-466 (SEQ ID NO:2345), DOM10-53-467 (SEQ ID NO:2346), DOM10-53-468 (SEQ ID NO:2347), DOM10-53-460 (SEQ ID NO:2348), DOM10-53-463 (SEQ ID NO:2349), DOM10-53-464 (SEQ ID NO:2350), DOM10-53-469 (SEQ ID NO:2351), DOM10-53-471 (SEQ ID NO:2352), DOM10-53-470 (SEQ ID NO:2353), DOM10-53-533 (SEQ ID NO:2354), DOM10-53-534 (SEQ ID NO:2355), DOM10-53-535 (SEQ ID NO:2356), DOM10-53-537 (SEQ ID NO:2357), DOM10-53-538 (SEQ ID NO:2358), DOM10-53-539 (SEQ ID NO:2359), DOM10-53-540 (SEQ ID NO:2360), DOM10-53-531 (SEQ ID NO:2361), DOM10-53-532 (SEQ ID NO:2362), DOM10-53-536 (SEQ ID NO:2363), DOM10-53-542 (SEQ ID NO:2364), DOM10-53-541 (SEQ ID NO:2365), DOM10-53-473 (SEQ ID NO:2366), DOM10-53-472 (SEQ ID NO:2367), DOM10-53-475 (SEQ ID NO:2368), DOM10-53-474 (SEQ ID NO:2369), DOM10-53-543 (SEQ ID NO:2370), DOM10-53-544 (SEQ ID NO: 2371), DOM10-53-545 (SEQ ID NO:2372), DOM10-53-548 (SEQ ID NO:2373), DOM10-53-546 (SEQ ID NO:2374), DOM10-53-549 (SEQ ID NO:2375), DOM10-53-547 (SEQ ID NO:2376), DOM10-53-550 (SEQ ID NO:2377), DOM10-53-551 (SEQ ID NO:2378), DOM10-53-560 (SEQ ID NO:2379), DOM10-53-565 (SEQ ID NO:2380), DOM10-53-559 (SEQ ID NO:2381), DOM10-53-561 (SEQ ID NO:2382), DOM10-53-562 (SEQ ID NO:2383), DOM10-53-563 (SEQ ID NO:2384), DOM10-53-564 (SEQ ID NO:2385), DOM10-53-566 (SEQ ID NO:2386), DOM10-53-554 (SEQ ID NO:2387), DOM10-53-552 (SEQ ID NO:2388), DOM10-53-553 (SEQ ID NO:2389), DOM10-53-558 (SEQ ID NO:2390), DOM10-53-556 (SEQ ID NO:2391) and DOM10-53-557 (SEQ ID NO:2392).

[0013] In particular embodiments, the ligand that has binding specificity for IL-4 and for IL-13 comprises a protein moiety that has a binding site with binding specificity for IL-4 that competes for binding to IL-4 with an anti-IL-4 domain antibody (dAb) selected from the group consisting of DOM9-112-155 (SEQ ID NO:292), DOM9-112-168 (SEQ ID NO:305), DOM9-112-174 (SEQ ID NO:311), DOM9-112-199 (SEQ ID NO:336), DOM9-112-200 (SEQ ID NO:337), DOM9-44-502 (SEQ ID NO:512), DOM9-155-5 (SEQ ID NO:606), DOM9-155-25 (SEQ ID NO:617), DOM9-155-77 (SEQ ID NO:2426), DOM9-155-78 (SEQ ID NO:2427), DOM9-112-202 (SEQ ID NO:339), DOM9-112-209 (SEQ ID NO:2433), DOM9-112-210 (SEQ ID NO:2434) and DOM9-44-502 (SEQ ID NO:512), and further comprises a protein moiety that has a binding site with binding specificity for IL-13 that competes for binding to IL-13 with an anti-IL-13 domain antibody (dAb) selected from the group consisting of DOM10-176-535 (SEQ ID NO:1587), DOM10-53-223 (SEQ ID NO:1090), DOM10-53-234 (SEQ ID NO:1101), DOM10-53-316 (SEQ ID NO:1182), DOM10-53-339 (SEQ ID NO:1203), DOM10-53-344 (SEQ ID NO:1208), DOM10-53-396 (SEQ ID NO:1260), DOM10-53-474 (SEQ ID NO:2369) and DOM10-275-1 (SEQ ID NO:2241).

[0014] The ligand that has binding specificity for IL-4 and IL-13 can inhibit binding of IL-4 to IL-4R, inhibit the activity of IL-4, and/or inhibit the activity of IL-4 without substantially inhibiting binding of IL-4 to IL-4R.

[0015] Preferably, the ligand (e.g., immunoglobulin single variable domain) that binds IL-4 inhibits binding of IL-4 to an IL-4 receptor (e.g., IL-4Rα) with an inhibitory concentration 50 (IC50) that is ≦10 μM, ≦1 μM, ≦100 nM, ≦10 nM, ≦1 nM, ≦500 pM, ≦300 pM, ≦100 pM, or ≦10 pM. The IC50 is preferably determined using an in vitro receptor binding assay, such as the assay described herein.

[0016] It is also preferred that the ligand (e.g., immunoglobulin single variable domain) that binds an IL-4 receptor inhibits IL-4 induced functions in a suitable in vitro assay with a neutralizing dose 50 (ND50) that is ≦10 μM, ≦1 μM, ≦100 nM, ≦10 nM, ≦1 nM, ≦500 pM, ≦300 pM, ≦100 pM, or ≦10 pM. For example, the ligand that binds an IL-4 receptor can inhibit IL-4 induced proliferation of TF-1 cells (ATCC Accession No, CRL-2003) in an in vitro assay, such as the assay described herein.

[0017] It is also preferred that the ligand (e.g., immunoglobulin single variable domain) that binds an IL-4 receptor inhibits house dust mite (HDM) induced proliferation of peripheral blood mononuclear cells (PBMC) by at least about 20%, at least about 30%, at least about 40%, at least about 50%, at least about 60%, at least about 70%, at least about 80%, or at least about 90% in a suitable in vitro assay, such as the assay described herein where 4×10⁶ cells/ml are stimulated with 20-50 ug/ml HDM and 100 nM anti-IL-4 dAbs are added.

[0018] A ligand (e.g., immunoglobulin single variable domain) that does not substantially inhibit binding of IL-4 to an IL-4 receptor (e.g., IL-4Rα) does not significantly inhibit binding of IL-4 to an IL-4 receptor in the receptor binding assay described herein. For example, such a ligand might inhibit binding of IL-4 to an IL-4 receptor in the receptor binding assay described herein with an IC50 of about 1 mM or higher or inhibits binding by no more than about 20%, no more than about 15%, no more than about 10%, or no more than about 5%.

[0019] The ligand that has binding specificity for IL-4 and IL-13 can inhibit binding of IL-13 to IL-13Rα1 and/or IL-13Rα2, inhibit the activity of IL-13, and/or inhibit the activity of IL-13 without substantially inhibiting binding of IL-13 to IL-13Rα1 and/or IL-13Rα2

[0020] Preferably, the ligand (e.g., immunoglobulin single variable domain) that binds IL-13 inhibits binding of IL-13 to an IL-13 receptor (e.g., IL-13Rα1, IL-13Rα2) with an inhibitory concentration 50 (IC50) that is ≦10 μM, ≦1 μM, ≦100 nM, ≦10 nM, ≦1 nM, 500 pM, ≦300 pM, ≦100 pM, or ≦10 pM. The IC50 is preferably determined using an in vitro receptor binding assay, such as the assay described herein.

[0021] It is also preferred that the ligand (e.g., immunoglobulin single variable domain) that binds an IL-13 receptor inhibits IL-13 induced functions in a suitable in vitro assay with a neutralizing dose 50 (ND50) that is ≦10 μM, ≦I≦100 nM, ≦10 nM, ≦1 nM, ≦500 pM, ≦300 pM, ≦100 pM, ≦10 pM, ≦1 pM≦500 fM, ≦300 fM, ≦100 fM, ≦10 fM. For example, the ligand that binds an IL-13 receptor can inhibit IL-13 induced proliferation of TF-1 cells (ATCC Accession No. CRL-2003) in an in vitro assay, such as the assay described herein wherein TF-1 cells were mixed with 5 ng/ml final concentration of IL-13.

[0022] It is also preferred that the ligand that binds an IL-13 receptor inhibits IL-13 induced B cell proliferation by at least about 50%, at least about 60%, at least about 70%, at least about 80%, or at least about 90% in an in vitro assay, such as the assay described herein where 1×10⁵ B cells were incubated with 10 or 100 nM anti-IL-13 dAbs.

[0023] A ligand (e.g., immunoglobulin single variable domain) that does not substantially inhibit binding of IL-13 to an IL-13 receptor (e.g., IL-13Rα1, IL-13Rα2) does not significantly inhibit binding of IL-13 to an IL-13 receptor in the receptor binding assay or sandwich ELISA described herein. For example, such a ligand might inhibit binding of IL-13 to an IL-13 receptor in the receptor binding assay described herein with an IC50 of about 1 mM or higher or inhibit binding by no more than about 20%, no more than about 15%, no more than about 10%, or no more than about 5%.

[0024] In more particular embodiments, the ligand that has binding specificity for IL-4 and for IL-13 comprises an immunoglobulin single variable domain with binding specificity for IL-4 and an immunoglobulin single variable domain with binding specificity for IL-13, wherein an immunoglobulin single variable domain with binding specificity for IL-4 competes for binding to IL-4 with an anti-IL-4 domain antibody (dAb) selected from the group of anti-IL-4 dAbs disclosed herein.

[0025] In more particular embodiments, the ligand that has binding specificity for IL-4 and for IL-13 comprises an immunoglobulin single variable domain with binding specificity for IL-4 and an immunoglobulin single variable domain with binding specificity for IL-13, wherein an immunoglobulin single variable domain with binding specificity for IL-13 competes for binding to IL-13 with an anti-IL-13 domain antibody (dAb) selected from the group consisting of the anti-IL-13 dAbs disclosed herein.

[0026] The ligand that has binding specificity for IL-4 and IL-13 can contain a protein binding moiety (e.g., immunoglobulin single variable domain) with binding specificity for IL-4 that binds IL-4 with an affinity (KD) that is between about 100 nM and about 1 pM, as determined by surface plasmon resonance.

[0027] The ligand that has binding specificity for IL-4 and IL-13 can contain a protein binding moiety (e.g., immunoglobulin single variable domain) with binding specificity for IL-13 that binds IL-13 with an affinity (KD) that is between about 100 nM and about 1 pM, as determined by surface plasmon resonance.

[0028] The ligand that has binding specificity for IL-4 and IL-13 can bind IL-4 with an affinity (KD) that is between about 100 nM and about 1 pM, as determined by surface plasmon resonance.

[0029] The ligand that has binding specificity for IL-4 and IL-13 can bind IL-13 with an affinity (KD) that is between about 100 nM and about 1 pM, as determined by surface plasmon resonance.

[0030] The ligand that has binding specificity for IL-4 and IL-13 can comprise an immunoglobulin single variable domain with binding specificity for IL-4 and an immunoglobulin single variable domain with binding specificity for IL-13, wherein the immunoglobulin single variable domains are selected from the group consisting of a human V_{H} and a human V_{L}.

[0031] In some embodiments, the ligand that has binding specificity for IL-4 and IL-13 can be an IgG-like format comprising two immunoglobulin single variable domains with binding specificity for IL-4, and two immunoglobulin single variable domains with binding specificity for IL-13.

[0032] In some embodiments, the ligand that has binding specificity for IL-4 and for IL-13 can comprise an antibody Fc region.

[0033] In some embodiments, the ligand that has binding specificity for IL-4 and IL-13 can comprise an IgG constant region.

[0034] The invention also relates to a ligand that has binding specificity for IL-4 comprising an immunoglobulin single variable domain with binding specificity for IL-4, wherein an immunoglobulin single variable domain with binding specificity for IL-4 competes for binding to IL-4 with an anti-IL-4 domain antibody (dAb) selected from the group consisting of the anti-IL-4 dAbs disclosed herein.

[0035] For example, an immunoglobulin single variable domain with binding specificity for IL-4 can comprise an amino acid sequence that has at least about 85% amino acid sequence identity with the amino acid sequence of a dAb selected from the group consisting of the anti-IL-4 dAbs disclosed herein.

[0036] The ligand that has binding specificity for IL-4 can inhibit binding of IL-4 to IL-4R, inhibit the activity of IL-4 and/or inhibit the activity of IL-4 without substantially inhibiting the binding of IL-4 to IL-4R.

[0037] Preferably, the ligand (e.g., immunoglobulin single variable domain) that binds IL-4 inhibits binding of IL-4 to an IL-4 receptor (e.g., IL-4Rα) with an inhibitory concentration 50 (IC50) that is ≦10 μM, ≦1 μM, ≦100 nM, ≦10 nM, ≦1 nM, ≦500 pM, ≦300 pM, ≦100 pM, or ≦10 pM. The IC50 is preferably determined using an in vitro receptor binding assay, such as the assay described herein.

[0038] It is also preferred that the ligand (e.g., immunoglobulin single variable domain) that binds an IL-4 receptor inhibits IL-4 induced functions in a suitable in vitro assay with a neutralizing dose 50 (ND50) that is ≦10 μM, ≦1 μM, ≦100 nM, ≦10 nM, ≦1 nM, ≦500 pM, ≦300 pM, ≦100 pM, or ≦10 pM. For example, the ligand that binds an IL-4 receptor can inhibit IL-4 induced proliferation of TF-1 cells (ATCC Accession No. CRL-2003) in an in vitro assay, such as the assay described herein.

[0039] It is also preferred that the ligand (e.g., immunoglobulin single variable domain) that binds an IL-4 receptor inhibits house dust mite (HDM) induced proliferation of peripheral blood mononuclear cells (PBMC) by at least about 20%, at least about 30%, at least about 40%, at least about 50%, at least about 60%, at least about 70%, at least about 80%, or at least about 90% in a suitable in vitro assay, such as the assay described herein where 4×10⁶ cells/ml are stimulated with 20-50 ug/ml HDM and 100 nM anti-IL-4 dAbs are added.

[0040] A ligand (e.g., immunoglobulin single variable domain) that does not substantially inhibit binding of IL-4 to an IL-4 receptor (e.g., IL-4Rα) does not significantly inhibit binding of IL-4 to an IL-4 receptor in the receptor binding assay described herein. For example, such a ligand might inhibit binding of IL-4 to an IL-4 receptor in the receptor binding assay described herein with an IC50 of about 1 nm or higher or inhibits binding by no more than about 20%, no more than about 15%, no more than about 10%, or no more than about 5%.

[0041] The ligand that has binding specificity for IL-4 can contain an immunoglobulin single variable domain with binding specificity for IL-4 that binds IL-4 with an affinity (KD) that is between about 100 nM and about 1 pM, as determined by surface plasmon resonance.

[0042] The ligand that has binding specificity for IL-4 can bind IL-4 with an affinity (KD) that is between about 100 nM and about 1 pM, as determined by surface plasmon resonance.

[0043] The ligand that has binding specificity for IL-4 can comprise an immunoglobulin single variable domain with binding specificity for IL-4 that is selected from the group consisting of a human V_{H} and a human V_{L}.

[0044] In some embodiments, the ligand that has binding specificity for IL-4 is an IgG-like format comprising at least two immunoglobulin single variable domains with binding specificity for IL-4.

[0045] In some embodiments, the ligand that has binding specificity for IL-4 comprises an antibody Fc region.

[0046] In some embodiments, the ligand that has binding specificity for IL-4 comprises an IgG constant region.

[0047] The invention also relates to a ligand that has binding specificity for IL-13 comprising an immunoglobulin single variable domain with binding specificity for IL-13, wherein an immunoglobulin single variable domain with binding specificity for IL-13 competes for binding to IL-13 with an anti-IL-13 domain antibody (dAb) selected from the group consisting of the anti-IL-13 dAbs disclosed herein.

[0048] For example, the immunoglobulin single variable domain with binding specificity for IL-13 can comprise an amino acid sequence that has at least about 85% amino acid sequence identity with the amino acid sequence of a dAb selected from the group consisting of the anti-IL-13 dAbs disclosed herein.

[0049] The ligand that has binding specificity for IL-13 can inhibit binding of IL-13 to IL-13Rα1 and/or IL-13Rα2, inhibit the activity of IL-13, and/or inhibit the activity of IL-13 without substantially inhibiting binding of IL-13Rα1 and/or IL-13Rα2 to IL-13.

[0050] Preferably, the ligand (e.g., immunoglobulin single variable domain) that binds IL-13 inhibits binding of IL-13 to an IL-13 receptor (e.g., IL-13Rα1, IL-13Rα2) with an inhibitory concentration 50 (IC50) that is ≦10 μM, ≦1 μM, ≦100 nM, ≦10 nM, ≦1 nM, ≦500 pM, ≦300 pM, ≦100 pM, or ≦10 pM. The IC50 is preferably determined using an in vitro receptor binding assay, such as the assay described herein.

[0051] It is also preferred that the ligand (e.g., immunoglobulin single variable domain) that binds an IL-13 receptor inhibits IL-13 induced functions in a suitable in vitro assay with a neutralizing dose 50 (ND50) that is ≦10 μM, ≦1 μM, ≦100 nM, ≦10 nM, ≦1 nM, ≦500 pM, ≦300 pM, ≦100 pM, 1.0 pM, ≦1 pM≦500 fM, 300 fM, ≦100 fM, ≦10 fM. For example, the ligand that binds an IL-13 receptor can inhibit IL-13 induced proliferation of TF-1 cells (ATCC Accession No. CRL-2003) in an in vitro assay, such as the assay described herein wherein TF-1 cells were mixed with 5 ng/ml final concentration of IL-13.

[0052] It is also preferred that the ligand that binds an IL-13 receptor inhibits IL-13 induced B cell proliferation by at least at least about 70%, at least about 80%, or at least about 90% in an in vitro assay, such as the assay described herein where 1×10⁵ B cells were incubated with 10 or 100 nM anti-IL-13 dAbs.

[0053] A ligand (e.g., immunoglobulin single variable domain) that does not substantially inhibit binding of IL-13 to an IL-13 receptor (e.g., IL-13Rα1, IL-13Rα2) does not significantly inhibit binding of IL-13 to an IL-13 receptor in the receptor binding assay or sandwich ELISA described herein. For example, such a ligand might inhibit binding of IL-13 to an IL-13 receptor in the receptor binding assay described herein with an IC50 of about 1 mM or higher or inhibit binding by no more than about 20%, no more than about 15%, no more than about 10%, or no more than about 5%.

[0054] The ligand that has binding specificity for IL-13 can contain an immunoglobulin single variable domain with binding specificity for IL-13 that binds IL-13 with an affinity (KD) that is between about 100 nM and about 1 pM, as determined by surface plasmon resonance.

[0055] The ligand that has binding specificity for IL-13 can bind IL-13 with an affinity (KD) that is between about 100 nM and about 1 pM, as determined by surface plasmon resonance.

[0056] The ligand that has binding specificity for IL-13 can comprise an immunoglobulin single variable domain with binding specificity for IL-13 that is selected from the group consisting of a human V_{H} and a human V_{L}.

[0057] In some embodiments, the ligand that has binding specificity for IL-13 is an IgG-like format comprising at least two immunoglobulin single variable domains with binding specificity for IL-13.

[0058] In some embodiments, the ligand that has binding specificity for IL-13 comprises an antibody Fc region.

[0059] In some embodiments, the ligand that has binding specificity for IL-13 comprises an IgG constant region.

[0060] The invention also relates to a ligand (e.g., a fusion protein) that has binding specificity for IL-4 and IL-13, comprising an immunoglobulin single variable domain with binding specificity for IL-4, wherein an immunoglobulin single variable domain with binding specificity for IL-4 competes for binding to IL-4 with an anti-IL-4 domain antibody (dAb) selected from the group consisting of the anti-IL-4 dAbs disclosed herein and comprising an immunoglobulin single variable domain with binding specificity for IL-13, wherein an immunoglobulin single variable domain with binding specificity for IL-13 competes for binding to IL-13 with an anti-IL-13 domain antibody (dAb) selected from the group consisting of the anti-IL-13 dAbs disclosed herein.

[0061] For example, the ligand (e.g., fusion protein) comprising an immunoglobulin single variable domain with binding specificity for IL-4 can comprise an amino acid sequence that has at least 85% amino acid sequence identity with the amino acid sequence of a dAb selected from the group consisting of the anti-IL-4 dAbs disclosed herein.

[0062] In another example, the ligand (e.g., fusion protein) comprising an immunoglobulin single variable domain with binding specificity for IL-13 can comprise an amino acid sequence that has at least 85% amino acid sequence identity with the amino acid sequence of a dAb selected from the group consisting of the anti-IL-13 dAbs disclosed herein.

[0063] In some embodiments, the ligand (e.g., fusion protein) comprising an immunoglobulin single variable domain with binding specificity for IL-4 and an immunoglobulin single variable domain with binding specificity for IL-3 further comprises a linker moiety.

[0064] The invention also relates to a ligand comprising a protein moiety that has a binding site with binding specificity for IL-4, wherein said protein moiety comprises an amino acid sequence that is the same as the amino acid sequence of CDR3 of an anti-IL-4 dAb disclosed herein.

[0065] In some embodiments, the ligand comprising a protein moiety that has a binding site with binding specificity for IL-4, wherein the protein moiety has an amino acid sequence that is the same as the amino acid sequence of CDR3 of an anti-IL-4 dAb disclosed herein, and also comprises an amino acid sequence that is the same as the amino acid sequence of CDR1 and/or CDR2 of an anti-IL-4 dAb disclosed herein.

[0066] In other embodiments, the ligand comprises an immunoglobulin single variable domain that binds IL-4, wherein the immunoglobulin single variable domain that binds IL-4 differs from the amino acid sequence of an anti-IL-4 dAb disclosed herein at no more than 25 amino acid positions and has a CDR1 sequence that has at least 50% identity to the CDR1 sequence of the anti-IL-4 dAbs disclosed herein.

[0067] In other embodiments, the ligand comprises an immunoglobulin single variable domain that binds IL-4, wherein the amino acid sequence of the immunoglobulin single variable domain that binds IL-4 differs from the amino acid sequence of an anti-IL-4 dAb disclosed herein at no more than 25 amino acid positions and has a CDR2 sequence that has at least 50% identity to the CDR2 sequence of the anti-IL-4 dAbs disclosed herein.

[0068] In other embodiments, the ligand comprises an immunoglobulin single variable domain that binds IL-4, wherein the amino acid sequence of the immunoglobulin single variable domain that binds IL-4 differs from the amino acid sequence of an anti-IL-4 dAb disclosed herein at no more than 25 amino acid positions and has a CDR3 sequence that has at least 50% identity to the CDR3 sequence of the anti-IL-4 dAbs disclosed herein.

[0069] In other embodiments, the ligand comprises an immunoglobulin single variable domain that binds IL-4, wherein the amino acid sequence of the immunoglobulin single variable domain that binds IL-4 differs from the amino acid sequence of an anti-IL-4 dAb disclosed herein at no more than 25 amino acid positions and has a CDR1 sequence and a CDR2 sequence that has at least 50% identity to the CDR1 or CDR2 sequences, respectively, of the anti-IL-4 dAbs disclosed herein.

[0070] In other embodiments, the ligand comprises an immunoglobulin single variable domain that binds IL-4, wherein the amino acid sequence of the immunoglobulin single variable domain that binds IL-4 differs from the amino acid sequence of an anti-IL-4 dAb disclosed herein at no more than 25 amino acid positions and has a CDR2 sequence and a CDR3 sequence that has at least 50% identity to the CDR2 or CDR3 sequences, respectively, of the anti-IL-4 dAbs disclosed herein.

[0071] In other embodiments, the ligand comprises an immunoglobulin single variable domain that binds IL-4, wherein the amino acid sequence of the immunoglobulin single variable domain that binds IL-4 differs from the amino acid sequence of an anti-IL-4 dAb disclosed herein at no more than 25 amino acid positions and has a CDR1 sequence and a CDR3 sequence that has at least 50% identity to the CDR1 or CDR3 sequences, respectively, of the anti-IL-4 dAbs disclosed herein.

[0072] In other embodiments, the ligand comprises an immunoglobulin single variable domain that binds IL-4, wherein the amino acid sequence of the immunoglobulin single variable domain that binds IL-4 differs from the amino acid sequence of an anti-IL-4 dAb disclosed herein at no more than 25 amino acid positions and has a CDR1 sequence, a CDR2 sequence and a CDR3 sequence that has at least 50% identity to the CDR1, CDR2 or CDR3 sequences, respectively, of the anti-IL-4 dAbs disclosed herein.

[0073] In another embodiment, the invention is a ligand comprising an immunoglobulin single variable domain that binds IL-4, wherein the immunoglobulin single variable domain that binds IL-4 has a CDR2 sequence that has at least 50% identity to the CDR2 sequences of an anti-IL-4 dAb disclosed herein.

[0074] In another embodiment, the invention is a ligand comprising an immunoglobulin single variable domain that binds IL-4, wherein the immunoglobulin single variable domain that binds IL-4 has a CDR3 sequence that has at least 50% identity to the CDR3 sequences of an anti-IL-4 dAb disclosed herein.

[0075] In another embodiment, the invention is a ligand comprising an immunoglobulin single variable domain that binds IL-4, wherein the immunoglobulin single variable domain that binds IL-4 has a CDR1 and a CDR2 sequence that has at least 50% identity to the CDR1 and CDR2 sequences, respectively, of an anti-IL-4 dAb disclosed herein.

[0076] In another embodiment, the invention is a ligand comprising an immunoglobulin single variable domain that binds IL-4, wherein the immunoglobulin single variable domain that binds IL-4 has a CDR2 and a CDR3 sequence that has at least 50% identity to the CDR2 and CDR3 sequences, respectively, of an anti-IL-4 dAb disclosed herein.

[0077] In another embodiment, the invention is a ligand comprising an immunoglobulin single variable domain that binds IL-4, wherein the immunoglobulin single variable domain that binds IL-4 has a CDR1 and a CDR3 sequence that has at least 50% identity to the CDR1 and CDR3 sequences, respectively, of an anti-IL-4 dAb disclosed herein.

[0078] In another embodiment, the invention is a ligand comprising an immunoglobulin single variable domain that binds IL-4, wherein the immunoglobulin single variable domain that binds IL-4 has a CDR1, CDR2, and a CDR3 sequence that has at least 50% identity to the CDR1, CDR2 and CDR3 sequences, respectively, of an anti-IL-4 dAb disclosed herein.

[0079] In some embodiments, the ligand comprises a protein moiety that has a binding site that binds IL-13, wherein said protein moiety comprises an amino acid sequence that is the same as the amino acid sequence of CDR3 of an anti-IL-13 dAb disclosed herein.

[0080] In other embodiments, the ligand comprises a protein moiety that has a binding site that binds IL-13, wherein said protein moiety comprises an amino acid sequence that is the same as the amino acid sequence of CDR3 of an anti-IL-13 dAb disclosed herein and has an amino acid sequence that is the same as the amino acid sequence of CDR1 and/or CDR2 of an anti-IL-13 dAb disclosed herein.

[0081] In other embodiments, the ligand comprises an immunoglobulin single variable domain that binds IL-13, wherein the amino acid sequence of the immunoglobulin single variable domain that binds IL-13 differs from the amino acid sequence of an anti-IL-13 dAb disclosed herein at no more than 25 amino acid positions and has a CDR1 sequence that has at least 50% identity to the CDR1 sequences of the anti-IL-13 dAbs disclosed herein.

[0082] In other embodiments, the ligand comprises an immunoglobulin single variable domain that binds IL-13, wherein the amino acid sequence of the immunoglobulin single variable domain that binds IL-13 differs from the amino acid sequence of an anti-IL-13 dAb disclosed herein at no more than 25 amino acid positions and has a CDR2 sequence that has at least 50% identity to the CDR2 sequences of the anti-IL-13 dAbs disclosed herein.

[0083] In other embodiments, the ligand comprises an immunoglobulin single variable domain that binds IL-13, wherein the amino acid sequence of the immunoglobulin single variable domain that binds IL-13 differs from the amino acid sequence of an anti-IL-13 dAb disclosed herein at no more than 25 amino acid positions and has a CDR3 sequence that has at least 50% identity to the CDR3 sequences of the anti-IL-13 dAbs disclosed herein.

[0084] In other embodiments, the ligand comprises an immunoglobulin single variable domain that binds IL-13, wherein the amino acid sequence of the immunoglobulin single variable domain that binds IL-13 differs from the amino acid sequence of an anti-IL-13 dAb disclosed herein at no more than 25 amino acid positions and has a CDR1 sequence and a CDR2 sequence that has at least 50% identity to the CDR1 and CDR2 sequences, respectively, of the anti-IL-13 dAbs disclosed herein.

[0085] In other embodiments, the ligand comprises an immunoglobulin single variable domain that binds IL-13, wherein the amino acid sequence of the immunoglobulin single variable domain that binds IL-13 differs from the amino acid sequence of an anti-IL-13 dAb disclosed herein at no more than 25 amino acid positions and has a CDR2 sequence and a CDR3 sequence that has at least 50% identity to the CDR2 and CDR3 sequences, respectively, of the anti-IL-13 dAbs disclosed herein.

[0086] In other embodiments, the ligand comprises an immunoglobulin single variable domain that binds IL-13, wherein the amino acid sequence of the immunoglobulin single variable domain that binds IL-13 differs from the amino acid sequence of an anti-IL-13 dAb disclosed herein at no more than 25 amino acid positions and has a CDR1 sequence and a CDR3 sequence that has at least 50% identity to the CDR1 and CDR3 sequences, respectively, of the anti-IL-13 dAbs disclosed herein.

[0087] In other embodiments, the ligand comprises an immunoglobulin single variable domain that binds IL-13, wherein the amino acid sequence of the immunoglobulin single variable domain that binds IL-13 differs from the amino acid sequence of an anti-IL-13 dAb disclosed herein at no more than 25 amino acid positions and has a CDR1 sequence, CDR2 sequence and a CDR3 sequence that has at least 50% identity to the CDR1, CDR2 and CDR3 sequences, respectively, of the anti-IL-13 dAbs disclosed herein.

[0088] In another embodiment, the invention is a ligand comprising an immunoglobulin single variable domain that binds IL-13, wherein the immunoglobulin single variable domain comprises a CDR2 sequence that has at least 50% identity to the CDR2 sequence of an anti-IL-13 dAb disclosed herein.

[0089] In another embodiment, the invention is a ligand comprising an immunoglobulin single variable domain that binds IL-13, wherein the immunoglobulin single variable domain comprises a CDR3 sequence that has at least 50% identity to the CDR3 sequence of an anti-IL-13 dAb disclosed herein.

[0090] In another embodiment, the invention is a ligand comprising an immunoglobulin single variable domain that binds IL-13, wherein the immunoglobulin single variable domain comprises a CDR1 and a CDR2 sequence that has at least 50% identity to the CDR1 and CDR2 sequences, respectively, of an anti-IL-13 dAb disclosed herein.

[0091] In another embodiment, the invention is a ligand comprising an immunoglobulin single variable domain that binds IL-13, wherein the immunoglobulin single variable domain comprises a CDR2 and a CDR3 sequence that has at least 50% identity to the CDR2 and CDR3 sequences, respectively, of an anti-IL-13 dAb disclosed herein.

[0092] In another embodiment, the invention is a ligand comprising an immunoglobulin single variable domain that binds IL-13, wherein the immunoglobulin single variable domain comprises a CDR1 and a CDR3 sequence that has at least 50% identity to the CDR1 and CDR3 sequences, respectively, of an anti-IL-13 dAb disclosed herein.

[0093] In another embodiment, the invention is a ligand comprising an immunoglobulin single variable domain that binds IL-13, wherein the immunoglobulin single variable domain comprises a CDR1, CDR2, and a CDR3 sequence that has at least 50% identity to the CDR1, CDR2, and CDR3 sequences, respectively, of an anti-IL-13 dAb disclosed herein.

[0094] In other embodiments, any of the ligands described herein further comprises a half-life extending moiety, such as a polyalkylene glycol moiety, serum albumin or a fragment thereof, transferring receptor or a transferring-binding portion thereof, or a moiety comprising a binding site for a polypeptide that enhance half-life in vivo. In some embodiments, the half-life extending moiety is a moiety comprising a binding site for a polypeptide that enhances half-life in vivo selected from the group consisting of an affibody, a SpA domain, an LDL receptor class A domain, an EGF domain, and an avimer.

[0095] In other embodiments, the half-life extending moiety is a polyethylene glycol moiety.

[0096] In other embodiments, the half-life extending moiety is an antibody or antibody fragment (e.g., an immunoglobulin single variable domain) comprising a binding site for serum albumin or neonatal Fc receptor.

[0097] The invention also relates to a ligand of the invention for use in therapy or diagnosis, and to the use of a ligand of the invention for the manufacture of a medicament for treatment, prevention or suppression of a disease described herein (e.g., allergic disease, Th2-mediated disease, asthma, cancer).

[0098] The invention also relates to a ligand of the invention for use in treating, suppressing or preventing a Th2-type immune response.

[0099] The invention also relates to therapeutic methods that comprise administering a therapeutically effective amount of a ligand of the invention to a subject in need thereof. In one embodiment, the invention relates to a method for inhibiting a Th2-type immune response comprising administering to a subject in need thereof a therapeutically effective amount of a ligand of the invention.

[0100] In other embodiments, the invention relates to a method for treating asthma comprising administering to a subject in need thereof a therapeutically effective amount of a ligand of the invention.

[0101] In other embodiments, the invention relates to a method for treating cancer comprising administering to a subject in need thereof a therapeutically effective amount of a ligand of the invention.

[0102] The invention also relates to the use of any of the ligands of the invention for the manufacture of a medicament for simultaneous administration of an anti-IL-4 treatment and an anti-IL-13 treatment. In other embodiments, the invention relates to a method of administering to a subject anti-IL-4 treatment and anti-IL-13 treatment, comprising simultaneous administration of an anti-IL-4 treatment and an anti-IL-13 treatment by administering to the subject a therapeutically effective amount of a ligand that has binding specificity for IL-4 and IL-13.

[0103] The invention also relates to a composition (e.g., pharmaceutical composition) comprising a ligand of the invention and a physiologically acceptable carrier. In some embodiments, the composition comprises a vehicle for intravenous, intramuscular, intraperitoneal, intraarterial, intrathecal, intraarticular, subcutaneous administration, pulmonary, intranasal, vaginal, or rectal administration.

[0104] The invention also relates to a drug delivery device comprising the composition (e.g., pharmaceutical composition) of the invention. In some embodiments, the drug delivery device comprises a plurality of therapeutically effective doses of ligand.

[0105] In other embodiments, the drug delivery device is selected from the group consisting of parenteral delivery device, intravenous delivery device, intramuscular delivery device, intraperitoneal delivery device, transdermal delivery device, pulmonary delivery device, intraarterial delivery device, intrathecal delivery device, intraarticular delivery device, subcutaneous delivery device, intranasal delivery device, vaginal delivery device, rectal delivery device, syringe, a transdermal delivery device, a capsule, a tablet, a nebulizer, an inhaler, an atomizer, an aerosolizer, a mister, a dry powder inhaler, a metered dose inhaler, a metered dose sprayer, a metered dose mister, a metered dose atomizer, and a catheter.

[0106] The invention also relates to an isolated or recombinant nucleic acid encoding any of the ligands of the invention. In other embodiments, the invention relates to a vector comprising the recombinant nucleic acid of the invention.

[0107] The invention also relates to a host cell comprising the recombinant nucleic acid of the invention or the vector of the invention.

[0108] The invention also relates to a method for producing a ligand, comprising maintaining a host cell of the invention under conditions suitable for expression of a nucleic acid or vector of the invention, whereby a ligand is produced. In other embodiments, the method of producing a ligand further comprises isolating the ligand.

[0109] The invention also relates to a method of inhibiting proliferation of peripheral blood mononuclear cells (PBMC) in an allergen-sensitized subject, comprising administering to a subject a pharmaceutical composition comprising any of the ligands of the invention. In some embodiments, the allergen is selected from house dust mite, cat allergen, grass allergen, mold allergen, and pollen allergen:

[0110] The invention also relates to a method of inhibiting proliferation of B cells in a subject, comprising administering to the subject a pharmaceutical composition comprising a ligand of the invention.

[0111] The invention also relates to a pharmaceutical composition for treating preventing or suppressing a disease as described herein (e.g., Th2-mediated disease, allergic disease, asthma, cancer), comprising as an active ingredient a ligand as described herein.

[0112] The invention also relates to a ligand that has binding specificity for IL-4 and IL-13 comprising a protein moiety that has a binding site with binding specificity for IL-4, and a protein moiety that has a binding site with binding specificity for IL-13, wherein the protein moiety that has binding specificity for IL-4 does not compete for binding with any of the anti-IL-4 dAbs disclosed herein.

[0113] The invention also relates to a ligand that has binding specificity for IL-4 and IL-13 comprising a protein moiety that has a binding site with binding specificity for IL-4, and a protein moiety that has a binding site with binding specificity for IL-13, wherein the protein moiety that has binding specificity for IL-13 does not compete for binding with any of the anti-IL-13 dAbs disclosed herein.

[0114] The invention also relates to a ligand that has binding specificity for IL-4 and IL-13, wherein the ligand is a fusion protein comprising an immunoglobulin single variable domain with binding specificity for IL-4 and an immunoglobulin single variable domain with binding specificity for IL-13, wherein the immunoglobulin single variable domain with binding specificity for IL-4 competes for binding to IL-4 with an anti-IL-4 domain antibody (dAb) selected from the group consisting of DOM9-112-210 and DOM9-155-78, and the immunoglobulin single variable domain with binding specificity for IL-13 competes for binding to IL-13 with an anti-IL-13 domain antibody (dAb) selected from the group consisting of DOM10-208, DOM10-212, DOM10-213, DOM10-215, DOM10-224, DOM10-270, DOM10-416, DOM10-236, DOM10-273, DOM10-275, DOM10-276 and DOM10-277.

[0115] In some embodiments, the invention relates to a ligand that has binding specificity for IL-4, comprising an immunoglobulin single variable domain with binding specificity for human IL-4 and a non-human IL-4. In preferred embodiments, the non-human IL-4 is selected from rhesus IL-4 and cynomolgous IL-4. It is also preferred that the binding affinity of the immunoglobulin single variable domain for non-human IL-4 and the binding affinity for human IL-4 differ by no more than a factor of 10, 50, 100, 500 or 1000.

[0116] In some embodiments, the invention relates to a ligand that has binding specificity for IL-13, comprising an immunoglobulin single variable domain with binding specificity for human IL-13 and a non-human IL-13. In preferred embodiments, the non-human IL-13 is selected from rhesus IL-13 and cynomolgous IL-13. It is also preferred that the binding affinity of the immunoglobulin single variable domain for non-human IL-13 and the binding affinity for human IL-13 differ by no more than a factor of 10, 50, 100, 500 or 1000.

[0117] In other embodiments, the invention relates to a ligand that has binding specificity for IL-4 and IL-13, comprising an immunoglobulin single variable domain with binding specificity for IL-4 and an immunoglobulin single variable domain with binding specificity for IL-13, wherein the immunoglobulin single variable domain with binding specificity for IL-4 binds human IL-4 and a non-human IL-4 and the immunoglobulin single variable domain with binding specificity for IL-13 binds human IL-13 and a non-human IL-13. In preferred embodiments, the non-human IL-4 is selected from rhesus IL-4 and cynomolgous IL-4 and the non-human IL-13 is selected from rhesus IL-13 and cynomolgous IL-13. It is also preferred that the binding affinity of the immunoglobulin single variable domain for non-human IL-4 and the binding affinity for human IL-4 differ by no more than a factor of 10, 50, 100, 500 or 1000, and the binding affinity of the immunoglobulin single variable domain for non-human IL-13 and the binding affinity for human IL-13 differ by no more than a factor of 10, 50, 100, 500 or 1000.

### BRIEF DESCRIPTION OF THE DRAWINGS

[0118] FIG. 1A-1U illustrates several nucleotide sequences that encode human (Homo sapiens) V_{H} domain antibodies (dAbs) that specifically bind human IL-4. The nucleotide sequences presented are SEQ ID NOS:1-174.

[0119] FIG. 2A-2J illustrates the amino acid sequences of the dAbs encoded by the nucleic acid sequences shown in FIG. 1A-1U. The amino acid sequences presented are SEQ ID NOS:175-348.

[0120] FIG. 3A-3S illustrates several nucleotide sequences that encode human (Homo sapiens) V_{κ} domain antibodies (dAbs) that specifically bind human IL-4. The nucleotide sequences presented are SEQ ID NOS:349-499.

[0121] FIG. 4A-4H illustrates the amino acid sequences of the dAbs encoded by the nucleic acid sequences shown in FIG. 3A-3S. The amino acid sequences presented are SEQ ID NOS:500-650.

[0122] FIG. 5A-5Z, 5AA-5MM illustrates several nucleotide sequences that encode human (Homo sapiens) V_{H} domain antibodies (dAbs) that specifically bind human IL-13. The nucleotide sequences presented are SEQ ID NOS:651-966.

[0123] FIG. 6A-6Q illustrates the amino acid sequences of the dAbs encoded by the nucleic acid sequences shown in FIG. 5A-5Z, 5AA-5MM. The amino acid sequences presented are SEQ ID NOS:967-1282.

[0124] FIG. 7A-7Z, 7AA-7BB illustrates several nucleotide sequences that encode human (Homo sapiens) V_{κ} domain antibodies (dAbs) that specifically bind human IL-13. The nucleotide sequences presented are SEQ ID NOS:1283-1507.

[0125] FIG. 8A-8L illustrates the amino acid sequences of the dAbs encoded by the nucleic acid sequences shown in FIG. 7A-7Z, 7AA, 7BB. The amino acid sequences presented are SEQ ID NOS:1508-1732.

[0126] FIG. 9A is an alignment of the amino acid sequences of six Vκs that bind rat serum albumin (RSA). The aligned amino acid sequences are from Vκs designated DOM7r-1 (SEQ ID NO:1736), DOM7r-3 (SEQ ID NO:1737), DOM7r-4 (SEQ ID NO:1738), DOM7r-5 (SEQ ID NO:1739), DOM7r-7 (SEQ ID NO:1740), and DOM7r-8 (SEQ ID NO:1741).

[0127] FIG. 9B is an alignment of the amino acid sequences of six V_{κ}s that bind human serum albumin (HSA). The aligned amino acid sequences are from V_{κ}s designated DOM7h-2 (SEQ ID NO:1742), DOM7h-3 (SEQ ID NO:1743), DOM7h-4 (SEQ ID NO:1744), DOM7h-6 (SEQ ID NO:1745), DOM7h-1 (SEQ ID NO:1746), and DOM7h-7 (SEQ ID NO:1747).

[0128] FIG. 9C is an alignment of the amino acid sequences of seven V_{H}s that bind human serum albumin and a consensus sequence (SEQ ID NO:1755). The aligned sequences are from V_{H}s designated DOM7h-22 (SEQ ID NO:1748), DOM7h-23 (SEQ ID NO:1749), DOM7h-24 (SEQ ID NO:1750), DOM7h-25 (SEQ ID NO:1751), DOM7h-26 (SEQ ID NO:1752), DOM7h-21 (SEQ ID NO:1753), and DOM7h-27 (SEQ ID NO:1754).

[0129] FIG. 9D is an alignment of the amino acid sequences of three Vκs that bind human serum albumin and rat serum albumin. The aligned amino acid sequences are from Vκs designated DOM7h-8 (SEQ ID NO:1756), DOM7r-13 (SEQ ID NO:1757), and DOM7r-14 (SEQ ID NO:1758).

[0130] FIG. 10 is an illustration of the amino acid sequences of Vκs that bind rat serum albumin (RSA). The illustrated sequences are from Vκs designated DOM7r-15 (SEQ ID NO:1759), DOM7r-16 (SEQ ID NO:1760), DOM7r-17 (SEQ ID NO:1761), DOM7r-18 (SEQ ID NO:1762), DOM7r-19 (SEQ ID NO:1763).

[0131] FIG. 11A-11B is an illustration of the amino acid sequences of the amino acid sequences of V_{H}s that bind rat serum albumin (RSA). The illustrated sequences are from V_{H}s designated DOM7r-20 (SEQ ID NO:1764), DOM7r-21 (SEQ ID NO:1765), DOM7r-22 (SEQ ID NO:1766), DOM7r-23 (SEQ ID NO:1767), DOM7r-24 (SEQ ID NO:1768), DOM7r-25 (SEQ ID NO:1769), DOM7r-26 (SEQ ID NO:1770), DOM7r-27 (SEQ ID NO:1771), DOM7r-28 (SEQ ID NO:1772), DOM7r-29 (SEQ ID NO:1773), DOM7r-30 (SEQ ID NO:1774), DOM7r-31 (SEQ ID NO:1775), DOM7r-32 (SEQ ID NO:1776), and DOM7r-33 (SEQ ID NO:1777).

[0132] FIG. 12 illustrates the amino acid sequences of several Camelid V_{HH}s that bind mouse serum albumin that are disclosed in WO 2004/041862. Sequence A (SEQ ID NO:1778), Sequence B (SEQ ID NO:1779), Sequence C (SEQ ID NO:1780), Sequence D (SEQ ID NO:1781), Sequence E (SEQ ID NO:1782), Sequence F (SEQ ID NO:1783), Sequence G (SEQ ID NO:1784), Sequence H (SEQ ID NO:1785), Sequence I (SEQ ID NO:1786), Sequence J (SEQ ID NO:1787), Sequence K (SEQ ID NO:1788), Sequence L (SEQ ID NO:1789), Sequence M (SEQ ID NO:1790), Sequence N (SEQ ID NO:1791), Sequence 0 (SEQ ID NO:1792), Sequence P (SEQ ID NO:1793) and Sequence Q (SEQ ID NO:1794).

[0133] FIG. 13 is a sensogram showing that some dAbs that bind IL-4 (DOM9-112-22, DOM9-44, and DOM9-155-1) bind to different epitopes on IL-4. IL-4 was immobilized on a surface plasmon resonance chip and a first anti-IL4 dAb was flowed over the surface and then a second dAb was flowed over the surface. This figure shows that DOM9-155-1 did not bind to IL-4 after DOM9-44 was bound. Similarly, DOM9-44 did not bind after DOM9-155-1 was bound. However, the third and fourth peaks show that DOM9-112-22 did bind IL-4 after DOM9-44 was bound and also after DOM9-155-1 was bound, demonstrating that these dAbs bind to different epitopes on the IL-4 antigen.

[0134] FIG. 14A is a graph showing the effect of 100 nM anti-IL-4 dAb (DOM9-44-502) on house dust mite (HDM) induced proliferation of peripheral blood mononuclear cells (PBMC) from twelve individual donors in an in vitro assay. Cell proliferation was assessed by measuring 3[H] thymidine incorporation. The addition of the anti-IL-4 dAb inhibited allergen-induced proliferation of PBMC obtained from ten out of the twelve donors. The average inhibition was 38%.

[0135] FIG. 14B is a graph showing the effect of 100 nM dAb (DOM9-155-11) on house dust mite (HDM) induced proliferation of PBMC from twelve individual donors in an in vitro assay. Cell proliferation was assessed by measuring 3[H] thymidine incorporation. The addition of the anti-IL-4 dAb inhibited allergen-induced proliferation of PBMC obtained from ten out of twelve donors. The average inhibition was 34%

[0136] FIG. 15 is a graph showing the effect of anti-IL-13 dAbs DOM10-53-338 and DOM10-176-535 on IL-13-induced B cell proliferation. Cell proliferation was assessed by measuring 3 [H] thymidine incorporation. Both dAbs showed an average inhibition of 80% at 10 nM and an average inhibition of 100% at 100 nM concentration.

[0137] FIG. 16A is a graph showing the effect of an extended half-life format dual specific ligand that binds IL-4 and IL-13 (PEGylated DOM9-112 (AST) DOM10-53-343) on IL-4 binding in an IL-4 receptor binding assay. The potency of the anti-IL-4 arm of the dual specific ligand (PEGylated DOM9-112 (AST) DOM10-53-343) was 13 nM. The potency of the dAb DOM9-112 monomer was 3.5 nM. The graph shows that the potency of the dual specific ligand (PEGylated DOM9-112 (AST) DOM10-53-343) was only slightly reduced as compared to the dAb.

[0138] FIG. 16B is a graph showing the effect of an extended half-life format dual specific ligand that binds IL-4 and IL-13 (PEGylated DOM9-112 (AST) DOM10-53-343) on IL-13 binding in an IL-13 receptor binding assay. The potency of the anti-IL-13 arm of the dual specific ligand was 310 pM and the potency of the dAb DOM10-53-343 monomer was 230 pM. The graph shows that the potency of the dual specific ligand was about the same as the dAb monomer.

[0139] FIG. 17A is a graph showing the effect of dual specific ligand (DOM9-112 (ASTKGPS) DOM10-53-344) on IL-4 binding in the IL-4 receptor binding assay. The potency of the anti IL-4 arm of the dual specific ligand and of the dAb DOM9-112 monomer were approximately 1 nM. The graph shows potency of the dual specific ligand was about the same as the dAb monomer.

[0140] FIG. 17B is a graph showing the effect of dual specific ligand (DOM9-112 (ASTKGPS) DOM10-53-344) on IL-13 binding in the IL-13 receptor binding assay. The potency of the anti IL-13 arm of the dual specific ligand was 120 pM. The potency of the dAb DOM10-53-344 monomer was 40 pM. The graph shows potency of the dual specific ligand was only slightly reduced as compared to the dAb monomer.

[0141] FIG. 18A is a graph showing the effect of a dual specific IgG-like format that binds IL-4 and IL-13 (IgG:9-44-502×10-176-535) on IL-4 binding in the IL-4 receptor binding assay. The potency of the dAb DOM9-44-502 monomer was 4 nM and the potency of the dual specific IgG-like format was 13 nM. The graph shows the potency of the anti-IL-4 dAb DOM9-44-502 monomer was reduced by 3-4 fold when formatted into the IgG-like format.

[0142] FIG. 18B is a graph showing the effect of a dual specific IgG-like format that binds IL-4 and IL-13 (IgG:9-44-502×10-176-535) on IL-13 binding in the IL-13 sandwich ELISA. The potency for both the dual specific IgG-like format and the dAb DOM10-176-535 monomer were 1 nM.

[0143] FIG. 19A-19Z, 19AA-19ZZ, 19AAA-19HHH illustrates several nucleotide sequences that encode human (Homo sapiens) domain antibodies (dAbs) that specifically bind human IL-13 and the nucleotide sequences of several primers. The nucleotide sequences presented are SEQ ID NOS:1804-2128.

[0144] FIG. 20A-20Z, 20AA-20CC illustrates the amino acid sequences of the dAbs encoded by the nucleic acid sequences shown in FIG. 19A-19Z, 19AA-19ZZ, 19AAA-19HHH. The amino acid sequences presented are SEQ ID NOS:2129-2392.

[0145] FIG. 21A-21E illustrates several nucleotide sequences that encode human (Homo sapiens) domain antibodies (dAbs) that specifically bind human IL-4. the nucleotide sequences presented are SEQ ID NOS:2393-2425.

[0146] FIG. 22A-22C illustrates the amino acid sequences of the dAbs encoded by the nucleic acid sequences shown in FIG. 21A-21E. The amino acid sequences presented are SEQ ID NOS:2426-2455 and SEQ ID NOS:1733-1735.

### DETAILED DESCRIPTION OF THE INVENTION

[0147] Within this specification embodiments have been described in a way which enables a clear and concise specification to be written, but it is intended and will be appreciated that embodiments may be variously combined or separated without parting from the invention.

[0148] As used herein, the term “ligand” refers to a compound that comprises at least one peptide, polypeptide or protein moiety that has a binding site with binding specificity for a desired endogenous target compound (e.g., IL-4, IL-13). The ligands according to the invention preferably comprise immunoglobulin variable domains which have different binding specificities, and do not contain variable domain pairs which together form a binding site for target compound (i.e., do not comprise an immunoglobulin heavy chain variable domain and an immunoglobulin light chain variable domain that together form a binding site for IL-4 or IL-13). Preferably each domain which has a binding site that has binding specificity for a target is an immunoglobulin single variable domain (e.g., immunoglobulin single heavy chain variable domain (e.g., V_{H}, V_{HH}), immunoglobulin single light chain variable domain (e.g., V_{L})) that has binding specificity for a desired target (e.g., IL-4, IL-13). Each polypeptide domain which has a binding site that has binding specificity for a target (e.g., IL-4, IL-13) can also comprise one or more complementarity determining regions (CDRs) of an antibody or antibody fragment (e.g., an immunoglobulin single variable domain) that has binding specificity for a desired target (e.g., IL-4, IL-13) in a suitable format, such that the binding domain has binding specificity for the target. For example, the CDRs can be grafted onto a suitable protein scaffold or skeleton, such as an affibody, a SpA scaffold, an LDL receptor class A domain, or an EGF domain. Further, the ligand can be bivalent (heterobivalent) or multivalent (heteromultivalent) as described herein. Thus, “ligands” include polypeptides that comprise two dAbs wherein each dAb binds to a different target (e.g., IL-4, IL-13). Ligands also include polypeptides that comprise at least two dAbs that bind different targets (or the CDRs of dAbs) in a suitable format, such as an antibody format (e.g., IgG-like format, scFv, Fab, Fab′, F(ab′)₂) or a suitable protein scaffold or skeleton, such as an affibody, a SpA scaffold, an LDL receptor class A domain, an EGF domain, avimer and multispecific ligands as described herein.

[0149] The polypeptide domain which has a binding site that has binding specificity for a target (e.g., IL-4, IL-13) can also be a protein domain comprising a binding site for a desired target, e.g., a protein domain is selected from an affibody, a SpA domain, an LDL receptor class A domain, an avimer (see, e.g., U.S. Patent Application Publication Nos. 2005/0053973, 2005/0089932, 2005/0164301). If desired, a “ligand” can further comprise one or more additional moieties, that can each independently be a peptide, polypeptide or protein moiety or a non-peptidic moiety (e.g., a polyalkylene glycol, a lipid, a carbohydrate). For example, the ligand can further comprise a half-life extending moiety as described herein (e.g., a polyalkylene glycol moiety, a moiety comprising albumin, an albumin fragment or albumin variant, a moiety comprising transferrin, a transferrin fragment or transferrin variant, a moiety that binds albumin, a moiety that binds neonatal Fc receptor).

[0150] As used herein, the phrase “target” refers to a biological molecule (e.g., peptide, polypeptide, protein, lipid, carbohydrate) to which a polypeptide domain which has a binding site can bind. The target can be, for example, an intracellular target (e.g., an intracellular protein target), a soluble target (e.g., a secreted protein such as IL-4, IL-13), or a cell surface target (e.g., a membrane protein, a receptor protein). Preferably, the target is IL-4 or IL-13.

[0151] The phrase “immunoglobulin single variable domain” refers to an antibody variable region (V_{H}, V_{HH}, V_{L}) that specifically binds a target, antigen or epitope independently of other V domains; however, as the term is used herein, an immunoglobulin single variable domain can be present in a format (e.g., hetero-multimer) with other variable regions or variable domains where the other regions or domains are not required for antigen binding by the single immunoglobulin variable domain (i.e., where the immunoglobulin single variable domain binds antigen independently of the additional variable domains). Each “immunoglobulin single variable domain” encompasses not only an isolated antibody single variable domain polypeptide, but also larger polypeptides that comprise one or more monomers of an antibody single variable domain polypeptide sequence. A “domain antibody” or “dAb” is the same as an “immunoglobulin single variable domain” polypeptide as the term is used herein. An immunoglobulin single variable domain polypeptide, is preferably a mammalian immunoglobulin single variable domain polypeptide, more preferably human, and includes rodent immunoglobulin single variable domains (for example, as disclosed in WO 00/29004, the contents of which are incorporated herein by reference in their entirety) and camelid V_{HH} dAbs. As used herein, camelid dAbs are immunoglobulin single variable domain polypeptides which are derived from species including camel, llama, alpaca, dromedary, and guanaco, and comprise heavy chain antibodies naturally devoid of light chain (V_{HH}). Similar dAbs, can be obtained from single chain antibodies from other species, such as nurse shark. Preferred ligands comprises at least two different immunoglobulin single variable domain polypeptides or at least two different dAbs.

[0152] The immunoglobulin single variable domains (dAbs) described herein contain complementarity determining regions (CDR1, CDR2 and CDR3). The locations of CDRs and frame work (FR) regions and a numbering system have been defined by Kabat et al. (Kabat, E. A. et al., Sequences of Proteins of Immunological Interest, Fifth Edition, U.S. Department of Health and Human Services, U.S. Government Printing Office (1991)). The amino acid sequences of the CDRs (CDR1, CDR2, CDR3) of the V_{H} and V_{κ} dAbs disclosed herein will be readily apparent to the person of skill in the art based on the well known Kabat amino acid numbering system and definition of the CDRs. According to the Kabat numbering system V_{L} (V_{κ} or V_{λ}) CDR1 is from position 24-34, V_{L} CDR2 is from position 50-56, V_{L} CDR3 is from position 89-97, and V_{H} CDR1 is from position 31-35, V_{H} CDR2 is from position 50-65 and V_{H} CDR3 is from position 95-102. Heavy chain CDR-H3 have varying lengths, insertions are numbered between residue H100 and H101 with letters up to K (i.e. H100, H100A . . . H100K, H101). Residue 103 which is the start of FR4 is almost always a W.

[0153] As used herein “interleukin-4” (IL-4) refers to naturally occurring or endogenous mammalian IL-4 proteins and to proteins having an amino acid sequence which is the same as that of a naturally occurring or endogenous corresponding mammalian IL-4 protein (e.g., recombinant proteins, synthetic proteins (i.e., produced using the methods of synthetic organic chemistry)). Accordingly, as defined herein, the term includes mature IL-4 protein, polymorphic or allelic variants, and other isoforms of an IL-4 and modified or unmodified forms of the foregoing (e.g., lipidated, glycosylated). Naturally occurring or endogenous IL-4 includes wild type proteins such as mature IL-4, polymorphic or allelic variants and other isoforms and mutant forms which occur naturally in mammals (e.g., humans, non-human primates). Such proteins can be recovered or isolated from a source which naturally produces IL-4, for example. These proteins and proteins having the same amino acid sequence as a naturally occurring or endogenous corresponding IL-4, are referred to by the name of the corresponding mammal. For example, where the corresponding mammal is a human, the protein is designated as a human IL-4. Several mutant IL-4 proteins are known in the art, such as those disclosed in WO 03/038041.

[0154] As used herein “interleukin-13” (IL-13) refers to naturally occurring or endogenous mammalian IL-13 proteins and to proteins having an amino acid sequence which is the same as that of a naturally occurring or endogenous corresponding mammalian IL-13 protein (e.g., recombinant proteins, synthetic proteins (i.e., produced using the methods of synthetic organic chemistry)). Accordingly, as defined herein, the term includes mature IL-13 protein, polymorphic or allelic variants, and other isoforms of IL-13 (e.g., produced by alternative splicing or other cellular processes), and modified or unmodified forms of the foregoing (e.g., lipidated, glycosylated). Naturally occurring or endogenous IL-13 include wild type proteins such as mature IL-13, polymorphic or allelic variants and other isoforms and mutant forms which occur naturally in mammals (e.g., humans, non-human primates). For example, as used herein IL-13 encompasses the human IL-13 variant in which Arg at position 110 of mature human IL-13 is replaced with Gln (position 110 of mature IL-13 corresponds to position 130 of the precursor protein) which is associated with asthma (atopic and nonatopic asthma) and other variants of IL-13. (Heinzmann et al., Hum Mol. Genet. 9:549-559 (2000).) Such proteins can be recovered or isolated from a source which naturally produces IL-13, for example. These proteins and proteins having the same amino acid sequence as a naturally occurring or endogenous corresponding IL-13, are referred to by the name of the corresponding mammal. For example, where the corresponding mammal is a human, the protein is designated as a human IL-13. Several mutant IL-13 proteins are known in the art, such as those disclosed in WO 03/035847.

[0155] “Affinity” and “avidity” are terms of art that describe the strength of a binding interaction. With respect to the ligands of the invention, avidity refers to the overall strength of binding between the targets (e.g., first cell surface target and second cell surface target) on the cell and the ligand. Avidity is more than the sum of the individual affinities for the individual targets.

[0156] As used herein, “toxin moiety” refers to a moiety that comprises a toxin. A toxin is an agent that has deleterious effects on or alters cellular physiology (e.g., causes cellular necrosis, apoptosis or inhibits cellular division).

[0157] As used herein, the term “dose” refers to the quantity of ligand administered to a subject all at one time (unit dose), or in two or more administrations over a defined time interval. For example, dose can refer to the quantity of ligand (e.g., ligand comprising an immunoglobulin single variable domain that binds IL-4 and an immunoglobulin single variable domain that binds IL-13) administered to a subject over the course of one day (24 hours) (daily dose), two days, one week, two weeks, three weeks or one or more months (e.g., by a single administration, or by two or more administrations). The interval between doses can be any desired amount of time.

[0158] As used herein “complementary” refers to when two immunoglobulin domains belong to families of structures which form cognate pairs or groups or are derived from such families and retain this feature. For example, a V_{H} domain and a V_{L} domain of an antibody are complementary; two V_{H} domains are not complementary, and two V_{L} domains are not complementary. Complementary domains may be found in other members of the immunoglobulin superfamily, such as the V_{α} and V_{β} (or γ and δ) domains of the T-cell receptor. Domains which are artificial, such as domains based on protein scaffolds which do not bind epitopes unless engineered to do so, are non-complementary. Likewise, two domains based on (for example) an immunoglobulin domain and a fibronectin domain are not complementary.

[0159] As used herein, “immunoglobulin” refers to a family of polypeptides which retain the immunoglobulin fold characteristic of antibody molecules, which contains two 13 sheets and, usually, a conserved disulphide bond. Members of the immunoglobulin superfamily are involved in many aspects of cellular and non-cellular interactions in vivo, including widespread roles in the immune system (for example, antibodies, T-cell receptor molecules and the like), involvement in cell adhesion (for example the ICAM molecules) and intracellular signaling (for example, receptor molecules, such as the PDGF receptor). The present invention is applicable to all immunoglobulin superfamily molecules which possess binding domains. Preferably, the present invention relates to antibodies.

[0160] As used herein “domain” refers to a folded protein structure which retains its tertiary structure independently of the rest of the protein. Generally, domains are responsible for discrete functional properties of proteins, and in many cases may be added, removed or transferred to other proteins without loss of function of the remainder of the protein and/or of the domain. By single antibody variable domain is meant a folded polypeptide domain comprising sequences characteristic of antibody variable domains. It therefore includes complete antibody variable domains and modified variable domains, for example in which one or more loops have been replaced by sequences which are not characteristic of antibody variable domains, or antibody variable domains which have been truncated or comprise N- or C-terminal extensions, as well as folded fragments of variable domains which retain at least in part the binding activity and specificity of the full-length domain. Thus, each ligand comprises at least two different domains.

[0161] “Repertoire” A collection of diverse variants, for example polypeptide variants which differ in their primary sequence. A library that encompasses a repertoire of polypeptides preferably comprises at least 1000 members.

[0162] “Library” The term library refers to a mixture of heterogeneous polypeptides or nucleic acids. The library is composed of members, each of which have a single polypeptide or nucleic acid sequence. To this extent, library is synonymous with repertoire. Sequence differences between library members are responsible for the diversity present in the library. The library may take the form of a simple mixture of polypeptides or nucleic acids, or may be in the form of organisms or cells, for example bacteria, viruses, animal or plant cells and the like, transformed with a library of nucleic acids. Preferably, each individual organism or cell contains only one or a limited number of library members. Advantageously, the nucleic acids are incorporated into expression vectors, in order to allow expression of the polypeptides encoded by the nucleic acids. In a preferred aspect, therefore, a library may take the form of a population of host organisms, each organism containing one or more copies of an expression vector containing a single member of the library in nucleic acid form which can be expressed to produce its corresponding polypeptide member. Thus, the population of host organisms has the potential to encode a large repertoire of genetically diverse polypeptide variants.

[0163] As used herein an antibody refers to IgG, IgM, IgA, IgD or IgE or a fragment (such as a Fab, F(ab′)₂, Fv, disulphide linked Fv, scFv, closed conformation multispecific antibody, disulphide-linked scFv, diabody) whether derived from any species naturally producing an antibody, or created by recombinant DNA technology; whether isolated from serum, B-cells, hybridomas, transfectomas, yeast or bacteria.

[0164] As described herein an “antigen.” is a molecule that is bound by a binding domain according to the present invention. Typically, antigens are bound by antibody ligands and are capable of raising an antibody response in vivo. It may be a polypeptide, protein, nucleic acid or other molecule: Generally, the dual-specific ligands according to the invention are selected for target specificity against two particular targets (e.g., antigens). In the case of conventional antibodies and fragments thereof, the antibody binding site defined by the variable loops (L1, L2, L3 and H1, H2, H3) is capable of binding to the antigen.

[0165] An “epitope” is a unit of structure conventionally bound by an immunoglobulin V_{H}/V_{L} pair. Epitopes define the minimum binding site for an antibody, and thus represent the target of specificity of an antibody. In the case of a single domain antibody, an epitope represents the unit of structure bound by a variable domain in isolation.

[0166] “Universal framework” refers to a single antibody framework sequence corresponding to the regions of an antibody conserved in sequence as defined by Kabat (“Sequences of Proteins of Immunological Interest”, US Department of Health and Human Services) or corresponding to the human germline immunoglobulin repertoire or structure as defined by Chothia and Lesk, (1987) J. Mol. Biol. 196:910-917. The invention provides for the use of a single framework, or a set of such frameworks, which has been found to permit the derivation of virtually any binding specificity through variation in the hypervariable regions alone.

[0167] The phrase, “half-life,” refers to the time taken for the serum concentration of the ligand to reduce by 50%, in vivo, for example due to degradation of the ligand and/or clearance or sequestration of the dual-specific ligand by natural mechanisms. The ligands of the invention are stabilized in vivo and their half-life increased by binding to molecules which resist degradation and/or clearance or sequestration. Typically, such molecules are naturally occurring proteins which themselves have a long half-life in viva. The half-life of a ligand is increased if its functional activity persists, in viva, for a longer period than a similar ligand which is not specific for the half-life increasing molecule. Thus a ligand specific for HSA and two target molecules is compared with the same ligand wherein the specificity to HSA is not present, that is does not bind HSA but binds another molecule. For example, it may bind a third target on the cell. Typically, the half-life is increased by 10%, 20%, 30%, 40%, 50% or more. Increases in the range of 2×, 3×, 4×, 5×, 10×, 20×, 30×, 40×, 50× or more of the half-life are possible. Alternatively, or in addition, increases in the range of up to 30×, 40×, 50×, 60×, 70×, 80×, 90×, 100×, 150× of the half life are possible.

[0168] As referred to herein, the term “competes” means that the binding of a first target to its cognate target binding domain is inhibited when a second target is bound to its cognate target binding domain. For example, binding may be inhibited sterically, for example by physical blocking of a binding domain or by alteration of the structure or environment of a binding domain such that its affinity or avidity for a target is reduced.

[0169] As used herein, the terms “low stringency,” “medium stringency,” “high stringency,” or “very high stringency conditions” describe conditions for nucleic acid hybridization and washing. Guidance for performing hybridization reactions can be found in Current Protocols in Molecular Biology, John Wiley & Sons, N.Y. (1989), 6.3.1-6.3.6, which is incorporated herein by reference in its entirety. Aqueous and nonaqueous methods are described in that reference and either can be used. Specific hybridization conditions referred to herein are as follows: (1) low stringency hybridization conditions in 6× sodium chloride/sodium citrate (SSC) at about 45 C, followed by two washes in 0.2×SSC, 0.1% SDS at least at 50 C (the temperature of the washes can be increased to 55 C for low stringency conditions); (2) medium stringency hybridization conditions in 6×SSC at about 45 C, followed by one or more washes in 0.2×SSC, 0.1% SDS at 60 C.; (3) high stringency hybridization conditions in 6×SSC at about 45 C, followed by one or more washes in 0.2×SSC, 0.1% SDS at 65 C; and preferably (4) very high stringency hybridization conditions are 0.5M sodium phosphate, 7% SDS at 65 C, followed by one or more washes at 0.2×SSC, 1% SDS at 65 C. Very high stringency conditions (4) are the preferred conditions and the ones that should be used unless otherwise specified.

[0170] Sequences similar or homologous (e.g., at least about 70% sequence identity) to the sequences disclosed herein are also part of the invention. In some embodiments, the sequence identity at the amino acid level can be about 80%, 85%, 90%, 91%, 92%, 93%, 94%, 95%, 96%, 97%, 98%, 99% or higher. At the nucleic acid level, the sequence identity can be about 70%, 75%, 80%, 85%, 90%, 91%, 92%, 93%, 94%, 95%, 96%, 97%, 98%, 99% or higher. Alternatively, substantial identity exists when the nucleic acid segments will hybridize under selective hybridization conditions (e.g., very high stringency hybridization conditions), to the complement of the strand. The nucleic acids may be present in whole cells, in a cell lysate, or in a partially purified or substantially pure form.

[0171] Calculations of “homology” or “sequence identity” or “similarity” between two sequences the terms are used interchangeably herein) are performed as follows. The sequences are aligned for optimal comparison purposes (e.g., gaps can be introduced in one or both of a first and a second amino acid or nucleic acid sequence for optimal alignment and non-homologous sequences can be disregarded for comparison purposes). In a preferred embodiment, the length of a reference sequence aligned for comparison purposes is at least 30%, preferably at least 40%, more preferably at least 50%, even more preferably at least 60%, and even more preferably at least 70%, 80%, 90%, 100% of the length of the reference sequence. The amino acid residues or nucleotides at corresponding amino acid positions or nucleotide positions are then compared. When a position in the first sequence is occupied by the same amino acid residue or nucleotide as the corresponding position in the second sequence, then the molecules are identical at that position (as used herein amino acid or nucleic acid “homology” is equivalent to amino acid or nucleic acid “identity”). The percent identity between the two sequences is a function of the number of identical positions shared by the sequences, taking into account the number of gaps, and the length of each gap, which need to be introduced for optimal alignment of the two sequences.

[0172] Amino acid and nucleotide sequence alignments and homology, similarity or identity, as defined herein are preferably prepared and determined using the algorithm BLAST 2 Sequences, using default parameters (Tatusova, T. A. et al., FEMS Microbiol Lett, 174:187-188 (1999)). Alternatively, the BLAST algorithm (version 2.0) is employed for sequence alignment, with parameters set to default values. BLAST (Basic Local Alignment Search. Tool) is the heuristic search algorithm employed by the programs blastp, blastn, blastx, tblastn, and tblastx; these programs ascribe significance to their findings using the statistical methods of Karlin and Altschul, 1990, Proc. Natl. Acad. Sci. USA 87(6):2264-8.

[0173] Unless defined otherwise, all technical and scientific terms used herein have the same meaning as commonly understood by one of ordinary skill in the art (e.g., in cell culture, molecular genetics, nucleic acid chemistry, hybridization techniques and biochemistry). Standard techniques are used for molecular, genetic and biochemical methods (see generally, Sambrook et al., Molecular Cloning: A Laboratory Manual, 2d ed. (1989) Cold Spring Harbor Laboratory Press, Cold Spring Harbor, N.Y. and Ausubel et al., Short Protocols in Molecular Biology (1999) 4th Ed, John Wiley & Sons, Inc. which are incorporated herein by reference) and chemical methods.

[0174] The invention relates to ligands that have binding specificity for IL-4 (e.g., human IL-4), ligands that have binding specificity for IL-13 (e.g., human IL-13), and to ligands that have binding specificity for IL-4 and IL-13 (e.g., human IL-4 and human IL-13). For example, the ligand can comprise a polypeptide domain having a binding site with binding specificity for IL-4, a polypeptide domain having a binding site with binding specificity IL-13, or comprise a polypeptide domain having a binding site with binding specificity for IL-4 and a polypeptide domain having a binding site with binding specificity for IL-13.

[0175] The invention also relates to ligands that have cross-reactivity with human IL-4 and a non-human IL-4 (e.g., rhesus IL-4, cynomolgous IL-4), ligands that have cross-reactivity with human IL-13 and a non-human IL-13 (e.g., rhesus IL-13, cynomolgous IL-13), and to ligands that have binding specificity for human IL-4, human IL-13, non-human IL-4 and non-human IL-13 (e.g., rhesus IL-4, rhesus IL-13, cynomolgous IL-4 and cynomolgous IL-13).

[0176] The ligands of the invention provide several advantages. For example, as described herein, the ligand can be tailored to have a desired in vivo serum half-life. Domain antibodies are much smaller than conventional antibodies, and can be administered to achieve better tissue penetration than conventional antibodies. Thus, dAbs and ligands that comprise a dAb provide advantages over conventional antibodies when administered to treat disease, such as Th2-mediated disease, asthma, allergic diseases, cancer (e.g., renal cell cancer). For example, asthma (e.g. allergic asthma) can be IgE-mediated or non-IgE-mediated, and ligands that have binding specificity for IL-4, IL-13 or IL-4 and IL-13 can be administered to treat both IgE-mediated and non-IgE-mediated asthma.

[0177] Similarly, due to the overlap and similarity in the biological activity of IL-4 and IL-13, therapy with agents that bind and inhibit only one of these cytokines may not produce the desired effects in all circumstances. Accordingly, ligands that have binding specificity for IL-4 and IL-13 can be administered to a patient (e.g., a patient with allergic disease (e.g., allergic asthma)) to provide superior therapy using a single therapeutic agent.

[0178] In some embodiments, the ligand has binding specificity for IL-4 and comprises an (at least one) immunoglobulin single variable domain with binding specificity for IL-4. In other embodiments, the ligand has binding specificity for IL-13 and comprises an (at least one) immunoglobulin single variable domain with binding specificity for IL-13. In certain embodiments, the ligand has binding specificity for IL-4 and IL-13, and comprises an (at least one) immunoglobulin single variable domain with binding specificity for IL-4 and an (at least one) immunoglobulin single variable domain with binding specificity for IL-13.

[0179] The ligand of the invention can be formatted as described herein. For example, the ligand of the invention can be formatted to tailor in vivo serum half-life. If desired, the ligand can further comprise a toxin or a toxin moiety as described herein. In some embodiments, the ligand comprises a surface active toxin, such as a free radical generator (e.g., selenium containing toxin) or a radionuclide. In other embodiments, the toxin or toxin moiety is a polypeptide domain (e.g., a dAb) having a binding site with binding specificity for an intracellular target. In particular embodiments, the ligand is an IgG-like format that has binding specificity for IL-4 and IL-13 (e.g., human IL-4 and human IL-13).

[0180] In one aspect, the invention relates to a ligand that has binding specificity for interleukin-4 (IL-4) and interleukin-13 (IL-13) comprising a protein moiety that has a binding site with binding specificity for IL-4; and a protein moiety that has a binding site with binding specificity for IL-13. The ligand that has binding specificity for IL-4 and IL-13 of this aspect of the invention, can be further characterized by any one or any combination of the following: (1) the proviso that said protein moiety that has a binding site with binding specificity for IL-4 is not an IL-4 receptor or IL-4-binding portion thereof, and said protein moiety that has a binding site with binding specificity for IL-13 is not an IL-13 receptor or IL-13-binding portion thereof; (2) the proviso that said binding site with binding specificity for IL-4 and said binding site with binding specificity for IL-13 each consist of a single amino acid chain; (3) the proviso that neither said binding site with binding specificity for IL-4 nor said binding site with binding specificity for IL-13 comprise an immunoglobulin heavy chain, variable domain and an immunoglobulin light chain variable domain; and (4) the proviso that said protein moiety that has a binding site with binding specificity for IL-4 is not an antibody that binds IL-4 or an antigen-binding fragment thereof that comprises an immunoglobulin heavy chain variable domain and an immunoglobulin light chain variable domain that together form a binding site for IL-4, and said protein moiety that has a binding site with binding specificity for IL-13 is not an antibody that binds IL-13 or an antigen-binding fragment thereof that comprises an immunoglobulin heavy chain variable domain and an immunoglobulin light chain variable domain that together form a binding site for IL-13.

[0181] In one aspect, the invention relates to a ligand that has binding specificity for IL-4, comprising a protein moiety that has a binding site with binding specificity for IL-4. The ligand that has binding specificity for IL-4 of this aspect of the invention, can be further characterized by any one or any combination of the following: (1) the proviso that said protein moiety that has a binding site with binding specificity for IL-4 is not an antibody that binds IL-4 or an antigen-binding fragment thereof that comprises an immunoglobulin heavy chain variable domain and an immunoglobulin light chain variable domain that together form a binding site for IL-4; (2) the proviso that said protein moiety that has a binding site with binding specificity for IL-4 is not an IL-4 receptor or IL-4-binding portion thereof; (3) the proviso that said binding site with binding specificity for IL-4 consists of a single amino acid chain; and (4) the proviso that said binding site with binding specificity for IL-4 does not consist of an immunoglobulin heavy chain variable domain and an immunoglobulin light chain variable domain.

[0182] In one aspect, the invention relates to a ligand that has binding specificity for IL-13, comprising a protein moiety that has a binding site with binding specificity for IL-13. The ligand that has binding specificity for IL-13 of this aspect of the invention, can be further characterized by any one or any combination of the following: (1) the proviso that said protein moiety that has a binding site with binding specificity for IL-13 is not an antibody that binds IL-13 or an antigen-binding fragment thereof that comprises an immunoglobulin heavy chain variable domain and an immunoglobulin light chain variable domain that together form a binding site for IL-13; (2) the proviso that said protein moiety that has a binding site with binding specificity for IL-13 is not an IL-13 receptor or IL-13-binding portion thereof; (3) the proviso that said binding site with binding specificity for IL-13 consists of a single amino acid chain; and (4) the proviso that said binding site with binding specificity for IL-13 does not consist of an immunoglobulin heavy chain variable domain and an immunoglobulin light chain variable domain.

### Ligand Formats

[0183] The ligand of the invention can be formatted as a monospecific, dual specific or multispecific ligand as described herein. See, also WO 03/002609, the entire teachings of which are incorporated herein by reference, regarding ligand formatting. Such dual specific ligands comprise immunoglobulin single variable domains that have different binding specificities. Such dual specific ligands can comprise combinations of heavy and light chain domains. For example, the dual specific ligand may comprise a V_{H} domain and a V_{L} domain, which may be linked together in the form of an scFv (e.g., using a suitable linker such as Gly₄Ser), or formatted into a bispecific antibody or antigen-binding fragment thereof (e.g. F(ab′)₂, Fab′, Fab fragment). The dual specific ligands do not comprise complementary V_{H}/V_{L} pairs which form a conventional two chain antibody antigen-binding site that binds antigen or epitope co-operatively. Instead, the dual format ligands can comprise a V_{H}/V_{L} complementary pair, wherein the V domains have different binding specificities.

[0184] The ligand (e.g., monospecific, dual specific ligands) may comprise one or more C_{H} or C_{L} domains if desired. A hinge region domain may also be included if desired. Such combinations of domains may, for example, mimic natural antibodies, such as IgG or IgM, or fragments thereof, such as Fv, scFv, Fab or F(ab′)₂ molecules. Other structures, such as a single arm of an IgG molecule comprising V_{H}, V_{L}, C_{H}1 and C_{L} domains, are envisaged. The ligand can comprise a heavy chain constant region of an immunoglobulin (e.g., IgG (e.g., IgG1, IgG2, IgG3, IgG4) IgM, IgA, IgD or IgE) or portion thereof (e.g., Fc portion) and/or a light chain constant region (e.g., C_{λ}, C_{κ}). For example, the ligand can comprise CH1 of IgG1 (e.g., human IgG1), CH1 and CH2 of IgG1 (e.g., human IgG1), CH1, CH2 and CH3 of IgG1 (e.g., human IgG1), CH2 and CH3 of IgG1 (e.g., human IgG1), or CH1 and CH3 of IgG1 (e.g., human IgG1).

[0185] In one example, a dual specific ligand of the invention comprises only two variable domains although several such ligands may be incorporated together into the same protein, for example two such ligands can be incorporated into an IgG or a multimeric immunoglobulin, such as IgM. Alternatively, in another embodiment a plurality of dual specific ligands are combined to form a multimer. For example, two different dual specific ligands are combined to create a tetra-specific molecule. It will be appreciated by one skilled in the art that the light and heavy variable regions of a dual-specific ligand of the present invention may be on the same polypeptide chain, or alternatively, on different polypeptide chains. In the case that the variable regions are on different polypeptide chains, then they may be linked via a linker, generally a flexible linker (such as a polypeptide chain), a chemical linking group, or any other method known in the art.

[0186] Ligands can be formatted as bi- or multispecific antibodies or antibody fragments or into bi- or multispecific non-antibody structures. Suitable formats include, any suitable polypeptide structure in which an antibody variable domain or one or more of the CDRs thereof can be incorporated so as to confer binding specificity for antigen on the structure. A variety of suitable antibody formats are known in the art, such as, bispecific IgG-like formats (e.g., chimeric antibodies, humanized antibodies, human antibodies, single chain antibodies, heterodimers of antibody heavy chains and/or light chains, antigen-binding fragments of any of the foregoing (e.g., a Fv fragment (e.g., single chain Fv (scFv), a disulfide bonded Fv), a Fab fragment, a Fab′ fragment, a F(ab′)₂ fragment), a single variable domain (e.g., V_{H}, V_{L}, V_{HH}), a dAb, and modified versions of any of the foregoing (e.g., modified by the covalent attachment of polyalkylene glycol (e.g., polyethylene glycol, polypropylene glycol, polybutylene glycol) or other suitable polymer). See, PCT/GB03/002804, filed Jun. 30, 2003, which designated the United States, (WO 2004/081026) regarding PEGylated of single variable domains and dAbs, suitable methods for preparing same, increased in vivo half life of the PEGylated single variable domains and dAb monomers and multimers, suitable PEGs, preferred hydrodynamic sizes of PEGs, and preferred hydrodynamic sizes of PEGylated single variable domains and dAb monomers and multimers. The entire teaching of PCT/GB03/002804 (WO 2004/081026), including the portions referred to above, are incorporated herein by reference.

[0187] The ligand can be formatted using a suitable linker such as (Gly₄Ser)ₙ, where n=from 1 to 8, (e.g., 1, 2, 3, 4, 5, 6 or 7). If desired, ligands, including dAb monomers, dimers and trimers, can be linked to an antibody Fc region, comprising one or both of C_{H}2 and C_{H}3 domains, and optionally a hinge region. For example, vectors encoding ligands linked as a single nucleotide sequence to an Fc region may be used to prepare such polypeptides.

[0188] Ligands and dAb monomers can also be combined and/or formatted into non-antibody multi-ligand structures to form multivalent complexes, which bind target molecules with the same antigen, thereby providing superior avidity. For example natural bacterial receptors such as SpA can been used as scaffolds for the grafting of CDRs to generate ligands which bind specifically to one or more epitopes. Details of this procedure are described in U.S. Pat. No. 5,831,012. Other suitable scaffolds include those based on fibronectin and affibodies. Details of suitable procedures are described in WO 98/58965. Other suitable scaffolds include lipocallin and CTLA4, as described in van den Beuken et al., J. Mol. Biol, 310:591-601 (2001), and scaffolds such as those described in WO 00/69907 (Medical Research Council), which are based for example on the ring structure of bacterial GroEL or other chaperone polypeptides. Protein scaffolds may be combined; for example, CDRs may be grafted on to a CTLA4 scaffold and used together with immunoglobulin V_{H} or V_{L} domains to form a ligand. Likewise, fibronectin, lipocallin and other scaffolds may be combined

[0189] A variety of suitable methods for preparing any desired format are known in the art. For example, antibody chains and formats (e.g., monospecific, bispecific, trispecific or tetraspecific IgG-like formats, chimeric antibodies, humanized antibodies, human antibodies, single chain antibodies, hornodimers and heterodimers of antibody heavy chains and/or light chains) can be prepared by expression of suitable expression constructs and/or culture of suitable cells (e.g., hybridomas, heterohybridomas, recombinant host cells containing recombinant constructs encoding the format). Further, formats such as antigen-binding fragments of antibodies or antibody, chains (e.g., bispecific binding fragments, such as a Fv fragment (e.g., single chain Fv (scFv), a disulfide bonded Fv), a Fab fragment, a Fab′ fragment, a F(ab′)₂ fragment), can be prepared by expression of suitable expression constructs or by enzymatic digestion of antibodies, for example using papain or pepsin.

[0190] The ligand can be formatted as a multispecific ligand, for example as described in WO 03/002609, the entire teachings of which are incorporated herein by reference. Such multispecific ligand possesses more than one epitope binding specificity. Generally, the multi-specific ligand comprises two or more epitope binding domains, such dAbs or non-antibody protein domain comprising a binding site for an epitope, e.g., an affibody, a SpA domain, an LDL receptor class A domain, an EGF domain, an avimer. Multispecific ligands can be formatted further as described herein.

[0191] In some embodiments, the ligand is an IgG-like format. Such formats have the conventional four chain structure of an IgG molecule (2 heavy chains and two light chains), in which one or more of the variable regions (V_{H} and or V_{L}) have been replaced with a dAb or immunoglobulin single variable domain of a desired specificity. Preferably, each of the variable regions (2 V_{H} regions and 2 V_{L} regions) is replaced with a dAb or immunoglobulin single variable domain. The dAb(s) or immunoglobulin single variable domain(s) that are included in an IgG-like format can have the same specificity or different specificities. In some embodiments, the IgG-like format is tetravalent and can have one, two, three or four specificities. The IgG-like format can be bispecific and comprise, for example, a first and second dAb that have the same specificity, a third dAb with a different specificity and a fourth dAb with a different specificity from the first, second and third dAbs; or tetraspecific and comprise four dAbs that each have a different specificity.

[0192] The IgG-like format can be monospecific and comprise 4 dAbs that have the specificity for IL-4 or for IL-13. The IgG-like format can be bispecific and comprise, for example, 3 dAbs that have specificity for IL-4 and another dAb that has specificity for IL-13, or bispecific and comprise, for example two dAbs that have specificity for IL-4 and two dAbs that have specificity for IL-13. The IgG-like format can be bispecific and comprise, for example, 3 dAbs that have specificity for IL-13 and another dAb that has specificity for IL-14. When the IgG-like format contains two or more dAbs that bind IL-4, the dAbs can bind to the same or different epitopes. For example, the IgG-like format can comprise two, three or four dAbs that have binding specificity for IL-4 that bind the same or different epitopes on IL-4. Similarly, when the IgG-like format contains two or more dAbs that bind IL-13, the dAbs can bind to the same or different epitopes. For example, the IgG-like format can comprise two, three or four dAbs that have binding specificity for IL-13 that bind the same or different epitopes on IL-13.

[0193] In one example, the IgG-like format is a tetravalent IgG-like ligand that has binding specificity for IL-4 or IL-13 comprising two heavy chains and two light chains, wherein said heavy chains comprise the constant region of an immunoglobulin heavy chain and a single immunoglobulin variable domain that has binding specificity for IL-4 or IL-13; and said light chains comprise the constant region of an immunoglobulin light chain and a single immunoglobulin variable domain that has binding specificity for IL-4 or IL-13. The IgG-like format of this example can be further characterized by the proviso that when said heavy chains comprise a single immunoglobulin variable domain that has binding specificity for IL-4, said light chains comprise a single immunoglobulin variable domain that has binding specificity for IL-13; and when said heavy chains comprise a single immunoglobulin variable domain that has binding specificity for IL-13, said light chains comprise a single immunoglobulin variable domain that has binding specificity for IL-4.

[0194] Antigen-binding fragments of IgG-like formats (e.g., Fab, F(ab′)₂, Fab′, Fv, scF_{V}) can be prepared. In addition, a particular constant region or Fc portion (e.g., constant region or Fc portion of an IgG, such as IgG1. (e.g., CH1, CH2 and CH3; CH2 and CH3)), variant or portion thereof can be selected in order to tailor effector function. For example, if complement activation and/or antibody dependent cellular cytotoxicity (ADCC) function is desired, the ligand can be an IgG1-like format. If desired, the IgG-like format can comprise a mutated constant region (variant IgG heavy chain constant region) to minimize binding to Fc receptors and/or ability to fix complement. (see e.g. Winter et al, GB 2,209,757 B; Morrison et al., WO 89/07142; Morgan et al., WO 94/29351, Dec. 22, 1994).

[0195] The ligands of the invention can be formatted as a fusion protein that contains a first immunoglobulin single variable domain that is fused directly (e.g., through a peptide bond) or through a suitable linker (amino acid, peptide, polypeptide) to a second immunoglobulin single variable domain. If desired such a format can further comprise, for example, one or more immunoglobulin domains (e.g., constant region, Fc portion) and/or a half life extending moiety as described herein. For example, the ligand can comprise a first immunoglobulin single variable domain that is fused directly to a second immunoglobulin single variable domain that is fused directly to an immunoglobulin single variable domain that binds serum albumin.

[0196] In one example, the ligand comprises a first single immunoglobulin single variable domain, a second immunoglobulin single variable domain and an Fc portion or an immunoglobulin constant region. The first and second immunoglobulin single variable domains can each have binding specificity for IL-4 or IL-13. Accordingly, this type of ligand can contain two binding sites (be bivalent) wherein each binding site binds IL-4, each binding site binds IL-13 or wherein one binding site binds IL-4 and one binding site binds IL-13. For example, the ligands can have the structure V domain-V domain-IgG constant region or V domain-V domain-IgG Fc portion.

[0197] Generally the orientation of the polypeptide domains that have a binding site with binding specificity for a target and whether the ligand comprises a linker is a matter of design choice. However, some orientations, with or without linkers, may provide better binding characteristics than other orientations. All orientations (e.g., dAb1-linker-dAb2; dAb2-linker-dAb1) are encompassed by the invention, and ligands that contain an orientation that provides desired binding characteristics can be easily identified by screening.

### Half-Life Extended Formats

[0198] The ligand, and dAb monomers disclosed herein, can be formatted to extend its in vivo serum half life. Increased in vivo half-life is useful in in vivo applications of immunoglobulins, especially antibodies and most especially antibody fragments of small size such as dAbs. Such fragments (Fvs, disulphide bonded Fvs, Fabs, says, dAbs) are rapidly cleared from the body, which can limit clinical applications.

[0199] A ligand can be formatted as a larger antigen-binding fragment of an antibody or as an antibody (e.g., formatted as a Fab, Fab′, F(ab)₂, F(ab′)₂, IgG, scFv) that has larger hydrodynamic size. Ligands can also be formatted to have a larger hydrodynamic size, for example, by attachment of a polyalkyleneglycol group (e.g. polyethyleneglycol (PEG) group, polypropylene glycol, polybutylene glycol), serum albumin, transferrin, transferrin receptor or at least the transferrin-binding portion thereof, an antibody Fc region, or by conjugation to an antibody domain. In some embodiments, the ligand (e.g., dAb monomer) is PEGylated. Preferably the PEGylated ligand (e.g., dAb monomer) binds IL-4 and/or IL-13 with substantially the same affinity or avidity as the same ligand that is not PEGylated. For example, the ligand can be a PEGylated ligand comprising a dAb that binds IL-4 or IL-13 with an affinity or avidity that differs from the avidity of ligand in unPEGylated form by no more than a factor of about 1000, preferably no more than a factor of about 100, more preferably no more than a factor of about 10, or with affinity or avidity substantially unchanged relative to the unPEGylated form. See, PCT/GB03/002804, filed Jun. 30, 2003, which designated the United States, (WO 2004/081026) regarding PEGylated single variable domains and dAbs, suitable methods for preparing same, increased in vivo half-life of the PEGylated single variable domains and dAb monomers and multimers, suitable PEGs, preferred hydrodynamic sizes of PEGs, and preferred hydrodynamic sizes of PEGylated single variable domains and dAb monomers and multimers. The entire teaching of PCT/GB03/002804 (WO 2004/081026), including the portions referred to above, are incorporated herein by reference.

[0200] Hydrodynamic size of the ligands (e.g., dAb monomers and multimers) of the invention may be determined using methods which are well known in the art. For example, gel filtration chromatography may be used to determine the hydrodynamic size of a ligand. Suitable gel filtration matrices for determining the hydrodynamic sizes of ligands, such as cross-linked agarose matrices, are well known and readily available.

[0201] The size of a ligand format (e.g., the size of a PEG moiety attached to a dAb monomer), can be varied depending on the desired application. For example, where a ligand is intended to leave the circulation and enter into peripheral tissues, it is desirable to keep the hydrodynamic size of the ligand low to facilitate diffusion from the blood stream. Alternatively, where it is desired to have the ligand remain in the systemic circulation for a longer period of time the size of the ligand can be increased, for example by formatting as an IgG-like protein or by addition of a 30 to 60 kDa PEG moiety (e.g., linear or branched 30 kDa PEG to 40 kDa PEG, such as addition of two 20 kDa PEG moieties.) The size of the ligand format can be tailored to achieve a desired in vivo serum half-life. For example, the size of the ligand format can be tailored to control exposure to a toxin and/or to reduce side effects of toxic agents.

[0202] The hydrodynamic size of a ligand (e.g., dAb monomer) and its serum half-life can also be increased by conjugating or linking the ligand to a binding domain (e.g., antibody or antibody fragment) that binds an antigen or epitope that increases half-life in vivo, as described herein. For example, the ligand (e.g., dAb monomer) can be conjugated or linked to an anti-serum albumin or anti-neonatal Fc receptor antibody or antibody fragment, (e.g., an anti-SA or anti-neonatal Fc receptor dAb, Fab, Fab′ or scFv), or to an anti-SA affibody or anti-neonatal Fc receptor affibody.

[0203] Examples of suitable albumin, albumin fragments or albumin variants for use in a ligand according to the invention are described in WO 2005/077042A2, which is incorporated herein by reference in its entirety. In particular, the following albumin, albumin fragments or albumin variants can be used in the present invention:
[0204] SEQ ID NO:1 (as disclosed in WO 2005/077042A2, this sequence being explicitly incorporated into the present disclosure by reference);
[0205] Albumin fragment or variant comprising or consisting of amino acids 1-387 of SEQ ID NO:1 in WO 2005/077042A2;
[0206] Albumin, or fragment or variant thereof, comprising an amino acid sequence selected from the group consisting of: (a) amino acids 54 to 61 of SEQ ID NO:1 in WO 2005/077042A2; (b) amino acids 76 to 89 of SEQ ID NO:1 in WO 2005/077042A2; (c) amino acids 92 to 100 of SEQ ID NO:1 in WO 2005/077042A2; (d) amino acids 170 to 176 of SEQ ID NO:1 in WO 2005/077042A2; (e) amino acids 247 to 252 of SEQ ID NO:1 in WO 2005/077042A2; (f) amino acids 266 to 277 of SEQ ID NO:1 in WO 2005/077042A2; (g) amino acids 280 to 288 of SEQ ID NO:1 in WO 2005/077042A2; (h) amino acids 362 to 368 of SEQ ID NO:1 in WO 2005/077042A2; (i) amino acids 439 to 447 of SEQ ID NO:1 in WO 2005/077042A2 (j) amino acids 462 to 475 of SEQ ID NO:1 in WO 2005/077042A2; (k) amino acids 478 to 486 of SEQ ID NO:1 in WO 2005/077042A2; and (l) amino acids 560 to 566 of SEQ ID NO:1 in WO 2005/077042A2.

[0207] Further examples of suitable albumin, fragments and analogs for use in a ligand according to the invention are described in WO 03/076567A2, which is incorporated herein by reference in its entirety. In particular, the following albumin, fragments or variants can be used in the present invention:
[0208] Human serum albumin as described in WO 03/076567A2, (e.g., in FIG. 3) (this sequence information being explicitly incorporated into the present disclosure by reference);
[0209] Human serum albumin (HA) consisting of a single non-glycosylated polypeptide chain of 585 amino acids with a formula molecular weight of 66,500 (See, Meloun, et al., FEBS Letters 58:136 (1975); Behrens, et al., Fed. Proc. 34:591 (1975); Lawn, et al., Nucleic Acids Research 9:6102-6114 (1981); Minghetti, et al., J. Biol. Chem. 261:6747 (1986));
[0210] A polymorphic variant or analog or fragment of albumin as described in Weitkamp, et al., Ann. Hum. Genet. 37:219 (1973);
[0211] An albumin fragment or variant as described in EP 322094, (e.g., HA(1-373), HA(1-388), HA(1-389), HA(1-369), and HA(1-419) and fragments between 1-369 and 1-419);
[0212] An albumin fragment or variant as described in EP 399666, (e.g., HA(1-177) and HA(1-200) and fragments between HA(1-X), where X is any number from 178 to 199).

[0213] Where a (one or more) half-life extending moiety (e.g., albumin, transferrin and fragments and analogs thereof) is used in the ligands of the invention, it can be conjugated to the ligand using any suitable method, such as, by direct fusion to the target-binding moiety (e.g., dAb or antibody fragment), for example by using a single nucleotide construct that encodes a fusion protein, wherein the fusion protein is encoded as a single polypeptide chain with the half-life extending moiety located N- or C-terminally to the cell surface target binding moieties. Alternatively, conjugation can be achieved by using a peptide linker between moieties, (e.g., a peptide linker as described in WO 03/076567A2 or WO 2004/003019) (these linker disclosures being incorporated by reference in the present disclosure to provide examples for use in the present invention).

[0214] Typically, a polypeptide that enhances serum half-life in vivo is a polypeptide which occurs naturally in vivo and which resists degradation or removal by endogenous mechanisms which remove unwanted material from the organism (e.g., human). For example, a polypeptide that enhances serum half-life in vivo can be selected from proteins from the extracellular matrix, proteins found in blood, proteins found at the blood brain barrier or in neural tissue, proteins localized to the kidney, liver, lung, heart, skin or bone, stress proteins, disease-specific proteins, or proteins involved in Fc transport.

[0215] Suitable polypeptides that enhance serum half-life in vivo include, for example, transferrin receptor specific ligand-neuropharmaceutical agent fusion proteins (see U.S. Pat. No. 5,977,307, the teachings of which are incorporated herein by reference), brain capillary endothelial cell receptor, transferrin, transferrin receptor (e.g., soluble transferrin receptor), insulin, insulin-like growth factor 1 (IGF 1) receptor, insulin-like growth factor 2 (IGF 2) receptor, insulin receptor, blood coagulation factor X, α1-antitrypsin and HNF 1α. Suitable polypeptides that enhance serum half-life also include alpha-1 glycoprotein (orosomucoid; AAG), alpha-1 antichymotrypsin (ACT), alpha-1 microglobulin (protein HC; AIM), antithrombin III (AT III), apolipoprotein A-1 (Apo A-1), apolipoprotein B (Apo B), ceruloplasmin (Cp), complement component C3 (C3), complement component C4 (C4), C1 esterase inhibitor (C1 INH), C-reactive protein (CRP), ferritin (FER), hemopexin (HPX), lipoprotein(a) (Lp(a)), mannose-binding protein (MBP), myoglobin (Myo), prealbumin (transthyretin; PAL), retinol-binding protein (RBP), and rheumatoid factor (RF).

[0216] Suitable proteins from the extracellular matrix include, for example, collagens, laminins, integrins and fibronectin. Collagens are the major proteins of the extracellular matrix. About 15 types of collagen molecules are currently known, found in different parts of the body, e.g. type I collagen (accounting for 90% of body collagen) found in bone, skin, tendon, ligaments, cornea, internal organs or type II collagen found in cartilage, vertebral disc, notochord, and vitreous humor of the eye.

[0217] Suitable proteins from the blood include, for example, plasma proteins (e.g., fibrin, α-2 macroglobulin, serum albumin, fibrinogen (e.g., fibrinogen A, fibrinogen B), serum amyloid protein A, haptoglobin, profilin, ubiquitin, uteroglobulin and β-2-microglobulin), enzymes and enzyme inhibitors (e.g., plasminogen, lysozyme, cystatin C, alpha-1-antitrypsin and pancreatic trypsin inhibitor), proteins of the immune system, such as immunoglobulin proteins (e.g., IgA, IgD, IgE, IgG, IgM, immunoglobulin light chains (kappa/lambda)), transport proteins (e.g., retinol binding protein, α-1 microglobulin), defensins (e.g., beta-defensin 1, neutrophil defensin 1, neutrophil defensin 2 and neutrophil defensin 3) and the like.

[0218] Suitable proteins found at the blood brain barrier or in neural tissue include, for example, melanocortin receptor, myelin, ascorbate transporter and the like.

[0219] Suitable polypeptides that enhance serum half-life in vivo also include proteins localized to the kidney (e.g., polycystin, type IV collagen, organic anion transporter K1, Heymann's antigen), proteins localized to the liver (e.g., alcohol dehydrogenase, G250), proteins localized to the lung (e.g., secretory component, which binds IgA), proteins localized to the heart (e.g., HSP 27, which is associated with dilated cardiomyopathy), proteins localized to the skin (e.g., keratin), bone specific proteins such as morphogenic proteins (BMPs), which are a subset of the transforming growth factor β superfamily of proteins that demonstrate osteogenic activity (e.g., BMP-2, BMP-4, BMP-5, BMP-6, BMP-7, BMP-8), tumor specific proteins (e.g., trophoblast antigen, herceptin receptor, oestrogen receptor, cathepsins (e.g., cathepsin B, which can be found in liver and spleen)).

[0220] Suitable disease-specific proteins include, for example, antigens expressed only on activated T-cells, including LAG-3 (lymphocyte activation gene), osteoprotegerin ligand (OPGL; see Nature 402, 304-309 (1999)), OX40 (a member of the TNF receptor family, expressed on activated T cells and specifically up-regulated in human T cell leukemia virus type-1 (HTLV-I)-producing cells; see Immunol. 165 (1):263-70 (2000)). Suitable disease-specific proteins also include, for example, metalloproteases (associated with arthritis/cancers) including CG6512 Drosophila, human paraplegia, human FtsH, human AFG3L2, murine ftsH; and angiogenic growth factors, including acidic fibroblast growth factor (FGF-1), basic fibroblast growth factor (FGF-2), vascular endothelial growth factor/vascular permeability factor (VEGF/VPF), transforming growth factor-alpha (TGF-α), tumor necrosis factor-alpha (TNF-α), angiogenin, interleukin-3 (IL-3), interleukin-8 (IL-8), platelet-derived endothelial growth factor (PD-ECGF), placental growth factor (P1GF), midkine platelet-derived growth factor-BB (PDGF), and fractalkine.

[0221] Suitable polypeptides that enhance serum half-life in vivo also include stress proteins such as heat shock proteins (HSPs). HSPs are normally found intracellularly. When they are found extracellularly, it is an indicator that a cell has died and spilled out its contents. This unprogrammed cell death (necrosis) occurs when as a result of trauma, disease or injury, extracellular HSPs trigger a response from the immune system. Binding to extracellular HSP can result in localizing the compositions of the invention to a disease site.

[0222] Suitable proteins involved in Fc transport include, for example, Brambell receptor (also known as FcRB). This Fc receptor has two functions, both of which are potentially useful for delivery. The functions are (1) transport of IgG from mother to child across the placenta (2) protection of IgG from degradation thereby prolonging its serum half-life. It is thought that the receptor recycles IgG from endosomes. (See, Holliger et al, Nat Biotechnol 15(7):632-6 (1997).)

[0223] Methods for pharmacokinetic analysis and determination of ligand half-life will be familiar to those skilled in the art. Details may be found in Kenneth, A. et al: Chemical Stability of Pharmaceuticals: A Handbook for Pharmacists and in Peters et al, Pharmacokinetic Analysis: A Practical Approach (1996). Reference is also made to “Pharmacokinetics”, M Gibaldi & D Perron, published by Marcel Dekker, 2^{nd} Rev. ex edition (1982), which describes pharmacokinetic parameters such as t alpha and t beta half lives and area under the curve (AUC).

Ligands that Contain a Toxin Moiety or Toxin

[0224] The invention also relates to ligands that comprise a toxin moiety or toxin. Suitable toxin moieties comprise a toxin (e.g., surface active toxin, cytotoxin). The toxin moiety or toxin can be linked or conjugated to the ligand using any suitable method. For example, the toxin moiety or toxin can be covalently bonded to the ligand directly or through a suitable linker. Suitable linkers can include noncleavable or cleavable linkers, for example, pH cleavable linkers that comprise a cleavage site for a cellular enzyme (e.g., cellular esterases, cellular proteases such as cathepsin B). Such cleavable linkers can be used to prepare a ligand that can release a toxin moiety or toxin after the ligand is internalized.

[0225] A variety of methods for linking or conjugating a toxin moiety or toxin to a ligand can be used. The particular method selected will depend on the toxin moiety or toxin and ligand to be linked or conjugated. If desired, linkers that contain terminal functional groups can be used to link the ligand and toxin moiety or toxin. Generally, conjugation is accomplished by reacting toxin moiety or toxin that contains a reactive functional group (or is modified to contain a reactive functional group) with a linker or directly with a ligand. Covalent bonds formed by reacting a toxin moiety or toxin that contains (or is modified to contain) a chemical moiety or functional group that can, under appropriate conditions, react with a second chemical group thereby forming a covalent bond. If desired, a suitable reactive chemical group can be added to ligand or to a linker using any suitable method. (See, e.g., Hermanson, G. T., Bioconjugate Techniques, Academic Press: San Diego, Calif. (1996).) Many suitable reactive chemical group combinations are known in the art, for example an amine group can react with an electrophilic group such as tosylate, mesylate, halo (chloro, bromo, fluoro, iodo), N-hydroxysuccinimidyl ester (NHS), and the like. Thiols can react with maleimide, iodoacetyl, acrylolyl, pyridyl disulfides, 5-thiol-2-nitrobenzoic acid thiol (TNB-thiol), and the like. An aldehyde functional group can be coupled to amine- or hydrazide-containing molecules, and an azide group can react with a trivalent phosphorous group to form phosphoramidate or phosphorimide linkages. Suitable methods to introduce activating groups into molecules are known in the art (see for example, Hermanson, G. T., Bioconjugate Techniques, Academic Press: San Diego, Calif. (1996)).

[0226] Suitable toxin moieties and toxins include, for example, a maytansinoid (e.g., maytansinol, e.g., DM1, DM4), a taxane, a calicheamicin, a duocarmycin, or derivatives thereof. The maytansinoid can be, for example, maytansinol or a maytansinol analogue. Examples of maytansinol analogs include those having a modified aromatic ring (e.g., C-19-decloro, C-20-demethoxy, C-20-acyloxy) and those having modifications at other positions (e.g., C-9-CH, C-14-alkoxymethyl, C-14-hydroxymethyl or aceloxymethyl, C-15-hydroxy/acyloxy, C-15-methoxy, C-18-N-demethyl, 4,5-deoxy). Maytansinol and maytansinol analogs are described, for example, in U.S. Pat. Nos. 5,208,020 and 6,333,410, the contents of which are incorporated herein by reference. Maytansinol can be coupled to antibodies and antibody fragments using, e.g., an N-succinimidyl 3-(2-pyridyldithio)proprionate (also known as N-succinimidyl 4-(2-pyridyldithio)pentanoate (or SPP), 4-succinimidyl-oxycarbonyl-a-(2-pyridyldithio)-toluene (SMPT), N-succinimidyl-3-(2-pyridyldithio)butyrate (SDPB), 2 iminothiolane, or S-acetylsuccinic anhydride. The taxane can be, for example, a taxol, taxotere, or novel taxane (see, e.g., WO 01/38318). The calicheamicin can be, for example, a bromo-complex calicheamicin (e.g., an alpha, beta or gamma bromo-complex), an iodo-complex calicheamicin (e.g., an alpha, beta or gamma iodo-complex), or analogs and mimics thereof. Bromo-complex calicheamicins include I1-BR, I2-BR, I3-BR, I4-BR, J1-BR, J2-BR and K1-BR. Iodo-complex calicheamicins include I1-I, I2-I, I3-I, J1-I, J2-I, L1-I and K1-BR. Calicheamicin and mutants, analogs and mimics thereof are described, for example, in U.S. Pat. Nos. 4,970,198; 5,264,586; 5,550,246; 5,712,374, and 5,714,586, the contents of each of which are incorporated herein by reference. Duocarmycin analogs (e.g., KW-2189, DC88, DC89 CBI-TMI, and derivatives thereof are described, for example, in U.S. Pat. No. 5,070,092, U.S. Pat. No. 5,187,186, U.S. Pat. No. 5,641,780, U.S. Pat. No. 5,641,780, U.S. Pat. No. 4,923,990, and U.S. Pat. No. 5,101,038, the contents of each of which are incorporated herein by reference.

[0227] Examples of other toxins include, but are not limited to antimetabolites (e.g., methotrexate, 6-mercaptopurine, 6-thioguanine, cytarabine, 5-fluorouracil decarbazine), alkylating agents (e.g., mechlorethamine, thioepa chlorambucil, CC-1065 (see U.S. Pat. Nos. 5,475,092, 5,585,499, 5,846,545), melphalan, carmustine (BSNU) and lomustine (CCNU), cyclophosphamide, busulfan, dibromomannitol, streptozotocin, mitomycin C, and cis-dichlorodiamine platinum (II) (DDP) cisplatin), anthracyclines (e.g., daunorubicin (formerly daunomycin) and doxorubicin), antibiotics (e.g., dactinomycin (formerly actinomycin), bleomycin, mithramycin, mitomycin, puromycin anthramycin (AMC)), duocarmycin and analogs or derivatives thereof, and anti-mitotic agents (e.g., vincristine, vinblastine, taxol, auristatins (e.g., auristatin E) and maytansinoids, and analogs or homologs thereof.

[0228] The toxin can also be a surface active toxin, such as a toxin that is a free radical generator (e.g. selenium containing toxin moieties), or radionuclide containing moiety. Suitable radionuclide containing moieties, include for example, moieties that contain radioactive iodine (¹³¹I or ¹²⁵I), yttrium (⁹⁰Y), lutetium (¹⁷⁷Lu), actinium (²²⁵Ac), praseodymium, astatine (²¹¹At), rhenium (¹⁸⁶Re), bismuth (²¹²Bi or ²¹³Bi), indium (¹¹¹In), technetium (⁹⁹mTc), phosphorus (³²P), rhodium (¹⁸⁸Rh), sulfur (³⁵S), carbon (¹⁴C), tritium (³H), chromium (⁵¹Cr), chlorine (³⁶Cl), cobalt (⁵⁷Co or ⁵⁸Co), iron (⁵⁹Fe), selenium (⁷⁵Se), or gallium (⁶⁷Ga).

[0229] The toxin can be a protein, polypeptide or peptide, from bacterial sources, e.g., diphtheria toxin, pseudomonas exotoxin (PE) and plant proteins, e.g., the A chain of ricin (RTA), the ribosome inactivating proteins (RIPS) gelonin, pokeweed antiviral protein, saporin, and dodecandron are contemplated for use as toxins.

[0230] Antisense compounds of nucleic acids designed to bind, disable, promote degradation or prevent the production of the mRNA responsible for generating a particular target protein can also be used as a toxin. Antisense compounds include antisense RNA or DNA, single or double stranded, oligonucleotides, or their analogs, which can hybridize specifically to individual mRNA species and prevent transcription and/or RNA processing of the mRNA species and/or translation of the encoded polypeptide and thereby effect a reduction in the amount of the respective encoded polypeptide. Ching, et. al., Proc. Natl. Acad. Sci. U.S.A. 86: 10006-10010 (1989); Broder, et al., Ann. Int. Med. 113: 604-618 (1990); Loreau, et al., FEBS Letters 274: 53-56 (1990); Useful antisense therapeutics include for example: Veglin ™ (VasGene) and OGX-011 (Oncogenix).

[0231] Toxins can also be photoactive agents. Suitable photoactive agents include porphyrin-based materials such as porfimer sodium, the green porphyrins, chlorin E6, hematoporphyrin derivative itself, phthalocyanines, etiopurpurins, texaphrin, and the like.

[0232] The toxin can be an antibody or antibody fragment that binds an intracellular target, such as a dAb that binds an intracellular target (an intrabody). Such antibodies or antibody fragments (dAbs) can be directed to defined subcellular compartments or targets. For example, the antibodies or antibody fragments (dAbs) can bind an intracellular target selected from erbB2, EGFR, BCR-ABL, p21Ras, Caspase3, Caspase7, Bcl-2, p53, Cyclin E, ATF-1/CREB, HPV16 E7, HP1, Type IV collagenases, cathepsin L as well as others described in Kontermann, R. E., Methods, 34:163-170 (2004), incorporated herein by reference in its entirety.

Polypeptide Domains that Bind IL-4

[0233] The invention provides polypeptide domains (e.g., immunoglobulin single variable domains, dAb monomers) that have a binding site with binding specificity for IL-4. In preferred embodiments, the polypeptide domain (e.g., dAb) binds to IL-4 with an affinity (KD; KD=K_{off}(kd)/Kₒₙ(ka)) of 300 nM to 1 pM (i.e., 3×10⁻⁷ to 5×10⁻¹²M), preferably 50 nM to 1 pM, more preferably 5 nM to 1 pM and most preferably 1 nM to 1 pM, for example a K_{D} of 1×10⁻⁷M or less, preferably 1×10⁻⁸ M or less, more preferably 1×10⁻⁹ M or less, advantageously 1×10⁻¹⁰ M or less and most preferably 1×10⁻¹¹ M or less; and/or a K_{off} rate constant of 5×10⁻¹ s⁻¹ to 1×10⁻⁷ s⁻¹, preferably 1×10⁻² s⁻¹ to 1×10⁻⁶ s⁻¹, more preferably 5×10⁻³ s⁻¹ to 1×10⁻⁵ s⁻¹, for example 5×10⁻¹ s⁻¹ or less, preferably 1×10⁻² s⁻¹ or less, advantageously 1×10⁻³ s⁻¹ or less, more preferably 1×10⁴ s⁻¹ or less, still more preferably 1×10⁻⁵ s¹ or less, and most preferably 1×10⁻⁶ s⁻¹ or less as determined by surface plasmon resonance.

[0234] In some embodiments, the polypeptide domain that has a binding site with binding specificity for IL-4 competes for binding to IL-4 with a dAb selected from the group consisting of DOM9-15 (SEQ ID NO:175), DOM9-17(SEQ ID NO:176), DOM9-23 (SEQ ID NO:177), DOM9-24 (SEQ ID NO:178), DOM9-25 (SEQ ID NO:179), DOM9-27 (SEQ ID NO:180), DOM9-28 (SEQ ID NO:181), DOM9-29 (SEQ ID NO:182), DOM9-30 (SEQ ID NO:183), DOM9-31 (SEQ ID NO:184), DOM9-32 (SEQ ID NO:185), DOM9-33 (SEQ ID NO:186), DOM9-50 (SEQ ID NO:187), DOM9-57 (SEQ ID NO:188), DOM9-59 (SEQ ID NO:189), DOM9-63 (SEQ ID NO:190), DOM9-67 (SEQ ID NO:191), DOM9-68 (SEQ ID NO:192), DOM9-70 (SEQ ID NO:193), DOM9-79 (SEQ ID NO:194), DOM9-82 (SEQ ID NO:195), DOM9-86 (SEQ ID NO:196), DOM9-94 (SEQ ID NO:197), DOM9-108 (SEQ ID NO:198), DOM9-112 (SEQ ID NO:199), DOM9-112-1 (SEQ ID NO:200), DOM9-112-2 (SEQ ID NO:201), DOM9-112-3 (SEQ ID NO:202), DOM9-112-4 (SEQ ID NO:203), DOM9-112-5 (SEQ ID NO:204), DOM9-112-6 (SEQ ID NO:205), DOM9-112-7 (SEQ ID NO:206), DOM9-112-8 (SEQ ID NO:207), DOM9-112-9 (SEQ ID NO:208), DOM9-112-10 (SEQ ID NO:209), DOM9-112-11 (SEQ ID NO:210), DOM9-112-12 (SEQ ID NO:211), DOM9-112-13 (SEQ ID NO:212), DOM9-112-14 (SEQ ID NO:213), DOM9-112-15 (SEQ ID NO:214), DOM9-112-16 (SEQ ID NO:215), DOM9-112-17 (SEQ ID NO:216), DOM9-112-18 (SEQ ID NO:217), DOM9-112-19 (SEQ ID NO:218), DOM9-112-20 (SEQ ID NO:219), DOM9-112-21 (SEQ ID NO:220), DOM9-112-22 (SEQ ID NO:221), DOM9-112-23 (SEQ ID NO:222), DOM9-112-25 (SEQ ID NO:223), DOM9-112-81 (SEQ ID NO:224), DOM9-112-82 (SEQ ID NO:225), DOM9-112-83 (SEQ ID NO:226), DOM9-112-84 (SEQ ID NO:227), DOM9-112-85 (SEQ ID NO:228), DOM9-112-86 (SEQ ID NO:229), DOM9-112-87 (SEQ ID NO:230), DOM9-112-88 (SEQ ID NO:231), DOM9-112-89 (SEQ ID NO:232), DOM9-112-90 (SEQ ID NO:233), DOM9-112-91 (SEQ ID NO:234), DOM9-112-92 (SEQ ID NO:235), DOM9-112-93 (SEQ ID NO:236), DOM9-112-94 (SEQ ID NO:237), DOM9-112-95 (SEQ ID NO:238), DOM9-112-96 (SEQ ID NO:239), DOM9-112-97 (SEQ ID NO:240), DOM9-112-98 (SEQ ID NO:241), DOM9-112-99 (SEQ ID NO:242), DOM9-112-100 (SEQ ID NO:243), DOM9-112-101 (SEQ ID NO:244), DOM9-1132-102 (SEQ ID NO:245), DOM9-112-103 (SEQ ID NO:246), DOM9-112-104 (SEQ ID NO:247), DOM9-112-105 (SEQ ID NO:248), DOM9-112-106 (SEQ ID NO:249), DOM9-112-107 (SEQ ID NO:250), DOM9-112-108 (SEQ ID NO:251), DOM9-112-109 (SEQ ID NO:252), DOM9-112-110 (SEQ ID NO:253), DOM9-112-111 (SEQ ID NO:254), DOM9-112-112 (SEQ ID NO:255), DOM9-112-113 (SEQ ID NO:256), DOM9-112-114 (SEQ ID NO:257), DOM9-112-115 (SEQ ID NO:258), DOM9-112-116 (SEQ ID NO:259), DOM9-112-117 (SEQ ID NO:260), DOM9-112-118 (SEQ ID NO:261), DOM9-112-119 (SEQ ID NO:262), DOM9-112-120 (SEQ ID NO:263), DOM9-112-121 (SEQ ID NO:264), DOM9-112-122 (SEQ ID NO:265), DOM9-112-123 (SEQ ID NO:266), DOM9-112-124 (SEQ ID NO:267), DOM9-112-125 (SEQ ID NO:268), DOM9-112-126 (SEQ ID NO:269), DOM9-112-127 (SEQ ID NO:270), DOM9-112-128 (SEQ ID NO:271), DOM9-112-134 (SEQ ID NO:272), DOM9-112-135 (SEQ ID NO:273), DOM9-112-136 (SEQ ID NO:274), DOM9-112-137 (SEQ ID NO:275), DOM9-112-138 (SEQ ID NO:276), DOM9-112-140 (SEQ ID NO:277), DOM9-112-141 (SEQ ID NO:278), DOM9-112-142 (SEQ ID NO:279), DOM9-112-143 (SEQ ID NO:280), DOM9-112-144 (SEQ ID NO:281), DOM9-112-145 (SEQ ID NO:282), DOM9-112-146 (SEQ ID NO:283), DOM9-112-147 (SEQ ID NO:284), DOM9-112-148 (SEQ ID NO:285), DOM9-112-149 (SEQ ID NO:286), DOM9-112-150 (SEQ ID NO:287), DOM9-112-151 (SEQ ID NO:288), DOM9-112-152 (SEQ ID NO:289), DOM9-112-153 (SEQ ID NO:290), DOM9-112-154 (SEQ ID NO:291), DOM9-112-155 (SEQ ID NO:292), DOM9-112-156 (SEQ ID NO:293), DOM9-112-157 (SEQ ID NO:294), DOM9-112-158 (SEQ ID NO:295), DOM9-112-159 (SEQ ID NO:296), DOM9-112-160 (SEQ ID NO:297), DOM9-112-161 (SEQ ID NO:298), DOM9-112-162 (SEQ ID NO:299), DOM9-112-163 (SEQ ID NO:300), DOM9-112-164 (SEQ ID NO:301), DOM9-112-165 (SEQ ID NO:302), DOM9-112-166 (SEQ ID NO:303), DOM9-112-167 (SEQ ID NO:304), DOM9-112-168 (SEQ ID NO:305), DOM9-112-169 (SEQ ID NO:306), DOM9-112-170 (SEQ ID NO:307), DOM9-112-171 (SEQ ID NO:308), DOM9-112-172 (SEQ ID NO:309), DOM9-112-173 (SEQ ID NO:310), DOM9-112-174 (SEQ ID NO:311), DOM9-112-175 (SEQ ID NO:312), DOM9-112-176 (SEQ ID NO:313), DOM9-112-177 (SEQ ID NO:314), DOM9-112-178 (SEQ ID NO:315), DOM9-112-179 (SEQ ID NO:316), DOM9-112-180 (SEQ ID NO:317), DOM9-112-181 (SEQ ID NO:318), DOM9-112-182 (SEQ ID NO:319), DOM9-112-183 (SEQ ID NO:320), DOM9-112-184 (SEQ ID NO:321), DOM9-112-185 (SEQ ID NO:322), DOM9-112-186 (SEQ ID NO:323), DOM9-112-187 (SEQ ID NO:324), DOM9-112-188 (SEQ ID NO:325), DOM9-112-189 (SEQ ID NO:326), DOM9-112-190 (SEQ ID NO:327), DOM9-112-191 (SEQ ID NO:328), DOM9-112-192 (SEQ ID NO:329), DOM9-112-193 (SEQ ID NO:330), DOM9-112-194 (SEQ ID NO:331), DOM9-112-195 (SEQ ID NO:332), DOM9-112-196 (SEQ ID NO:333), DOM9-112-197 (SEQ ID NO:334), DOM9-112-198 (SEQ ID NO:335), DOM9-112-199 (SEQ ID NO:336), DOM9-112-200 (SEQ ID NO:337), DOM9-112-201 (SEQ ID NO:338), DOM9-112-202 (SEQ ID NO:339), DOM9-120 (SEQ ID NO:340), DOM9-121 (SEQ ID NO:341), DOM9-122 (SEQ ID NO:342), DOM9-123 (SEQ ID NO:343), DOM9-124 (SEQ ID NO:344), DOM9-125 (SEQ ID NO:345), DOM9-128 (SEQ ID NO:346), DOM9-134 (SEQ ID NO:347), DOM9-136 (SEQ ID NO:348), DOM9-26 (SEQ ID NO:500), DOM9-35 (SEQ ID NO:501), DOM9-36 (SEQ ID NO:502), DOM9-37 (SEQ ID NO:503), DOM9-38 (SEQ ID NO:504), DOM9-39 (SEQ ID NO:505), DOM9-40 (SEQ ID NO:506), DOM9-41 (SEQ ID NO:507), DOM9-43 (SEQ ID NO:508), DOM9-44 (SEQ ID NO:509), DOM9-44-500 (SEQ ID NO:510), DOM9-44-501 (SEQ ID NO:511), DOM9-44-502 (SEQ ID NO:512), DOM9-44-503 (SEQ ID NO:513), DOM9-44-504 (SEQ ID NO:514), DOM9-44-505 (SEQ ID NO:515), DOM9-44-506 (SEQ ID NO:516), DOM9-44-507 (SEQ ID NO:517), DOM9-44-509 (SEQ ID NO:518), DOM9-44-510 (SEQ ID NO:519), DOM9-44-511 (SEQ ID NO:520), DOM9-44-512 (SEQ ID NO:521), DOM9-44-513 (SEQ ID NO:522), DOM9-44-514 (SEQ ID NO:523), DOM9-44-515 (SEQ ID NO:524), DOM9-44-516 (SEQ ID NO:525), DOM9-44-517 (SEQ ID NO:526), DOM9-44-518 (SEQ ID NO:527), DOM9-44-519 (SEQ ID NO:528), DOM9-44-520 (SEQ ID NO:529), DOM9-44-521 (SEQ ID NO:530), DOM9-44-522 (SEQ ID NO:531), DOM9-44-523 (SEQ ID NO:532), DOM9-44-524 (SEQ ID NO:533), DOM9-44-525 (SEQ ID NO:534), DOM9-44-526 (SEQ ID NO:535), DOM9-44-527 (SEQ ID NO:536), DOM9-44-528 (SEQ ID NO:537), DOM9-44-529 (SEQ ID NO:538), DOM9-44-530 (SEQ ID NO:539), DOM9-44-531 (SEQ ID NO:540), DOM9-44-532 (SEQ ID NO:541), DOM9-44-533 (SEQ ID NO:542), DOM9-44-534 (SEQ ID NO:543), DOM9-44-535 (SEQ ID NO:544), DOM9-44-536 (SEQ ID NO:545), DOM9-44-537 (SEQ ID NO:546), DOM9-44-538 (SEQ ID NO:547), DOM9-44-539 (SEQ ID NO:548), DOM9-44-540 (SEQ ID NO:549), DOM9-44-541 (SEQ ID NO:550), DOM9-44-542 (SEQ ID NO:551), DOM9-44-543 (SEQ ID NO:552), DOM9-44-544 (SEQ ID NO:553), DOM9-44-545 (SEQ ID NO:554), DOM9-44-546 (SEQ ID NO:555), DOM9-44-547 (SEQ ID NO:556), DOM9-44-548 (SEQ ID NO:557), DOM9-44-549 (SEQ ID NO:558), DOM9-44-550 (SEQ ID NO:559), DOM9-44-551 (SEQ ID NO:560), DOM9-44-552 (SEQ ID NO:561), DOM9-44-553 (SEQ ID NO:562), DOM9-44-554 (SEQ ID NO:563), DOM9-44-555 (SEQ ID NO:564), DOM9-44-556 (SEQ ID NO:565), DOM9-44-557 (SEQ ID NO:566), DOM9-44-558 (SEQ ID NO:567), DOM9-44-559 (SEQ ID NO:568), DOM9-44-560 (SEQ ID NO:569), DOM9-44-561 (SEQ ID NO:570), DOM9-44-562 (SEQ ID NO:571), DOM9-44-563 (SEQ ID NO:572), DOM9-44-564 (SEQ ID NO:573), DOM9-44-565 (SEQ ID NO:574), DOM9-44-566 (SEQ ID NO:575), DOM9-44-625 (SEQ ID NO:576), DOM9-44-626 (SEQ ID NO:577), DOM9-44-627 (SEQ ID NO:578), DOM9-44-628 (SEQ ID NO:579), DOM9-44-629 (SEQ ID NO:580), DOM9-44-630 (SEQ ID NO:581), DOM9-44-631 (SEQ ID NO:582), DOM9-44-632 (SEQ ID NO:583), DOM9-44-633 (SEQ ID NO:584), DOM9-44-634 (SEQ ID NO:585), DOM9-44-636 (SEQ ID NO:586), DOM9-44-637 (SEQ ID NO:587), DOM9-44-639 (SEQ ID NO:588), DOM9-44-640 (SEQ ID NO:589), DOM9-44-641(SEQ ID NO:590), DOM9-44-642 (SEQ ID NO:591), DOM9-44-643 (SEQ ID NO:592), DOM9-44-644 (SEQ ID NO:593), DOM9-45 (SEQ ID NO:594), DOM9-46 (SEQ ID NO:595), DOM9-47 (SEQ ID NO:596), DOM9-48 (SEQ ID NO:597), DOM9-143 (SEQ ID NO:598), DOM9-144 (SEQ ID NO:599), DOM9-146 (SEQ ID NO:600), DOM9-152 (SEQ ID NO:601), DOM9-155 (SEQ ID NO:602), DOM9-155-001 (SEQ ID NO:603), DOM9-155-3 (SEQ ID NO:604), DOM9-155-5 (SEQ ID NO:605), DOM9-155-8 (SEQ ID NO:606), DOM9-155-9 (SEQ ID NO:607), DOM9-155-11 (SEQ ID NO:608), DOM9-155-13 (SEQ ID NO:609), DOM9-155-14 (SEQ ID NO:610), DOM9-155-17 (SEQ ID NO:611), DOM9-155-19 (SEQ ID NO:612), DOM9-155-20 (SEQ ID NO:613), DOM9-155-22 (SEQ ID NO:614), DOM9-155-23 (SEQ ID NO:615), DOM9-155-24 (SEQ ID NO:616), DOM9-155-25 (SEQ ID NO:617), DOM9-155-26 (SEQ ID NO:618), DOM9-155-27 (SEQ ID NO:619), DOM9-155-28 (SEQ ID NO:620), DOM9-155-29 (SEQ ID NO:621), DOM9-155-30 (SEQ ID NO:622), DOM9-155-31 (SEQ ID NO:623), DOM9-155-32 (SEQ ID NO:624), DOM9-155-33 (SEQ ID NO:625), DOM9-155-34 (SEQ ID NO:626), DOM9-155-35 (SEQ ID NO:627), DOM9-155-36 (SEQ ID NO:628), DOM9-155-37 (SEQ ID NO:629), DOM9-155-38 (SEQ ID NO:630), DOM9-155-39 (SEQ ID NO:631), DOM9-155-41 (SEQ ID NO:632), DOM9-155-42 (SEQ ID NO:633), DOM9-155-43 (SEQ ID NO:634), DOM9-155-44 (SEQ ID NO:635), DOM9-155-45(SEQ ID NO:636), DOM9-155-46 (SEQ ID NO:637), DOM9-155-47 (SEQ ID NO:638), DOM9-155-48 (SEQ ID NO:639), DOM9-155-49 (SEQ ID NO:640), DOM9-155-50 (SEQ ID NO:641), DOM9-155-51 (SEQ ID NO:642), DOM9-155-52 (SEQ ID NO:643), DOM9-155-53 (SEQ ID NO:644), DOM9-158 (SEQ ID NO:645), DOM9-160 (SEQ ID NO:646), DOM9-161 (SEQ ID NO:647), DOM9-162 (SEQ ID NO:648), DOM19-163 (SEQ ID NO:649) and DOM9-164 (SEQ ID NO:650).

[0235] In some embodiments, the polypeptide domain that has a binding site with binding specificity for IL-4 competes for binding to IL-4 with a dAb selected from the group consisting of DOM9-155-77 (SEQ ID NO:2426), DOM9-155-78 (SEQ ID NO:2427), DOM9-112-204 (SEQ ID NO:2428), DOM9-112-205 (SEQ ID NO:2429), DOM9-112-206 (SEQ ID NO:2430), DOM9-112-207 (SEQ ID NO:2431), DOM9-112-208 (SEQ ID NO:2432), DOM9-112-209 (SEQ ID NO:2433), DOM9-112-210 (SEQ ID NO:2434), DOM9-112-211 (SEQ ID NO:2435), DOM9-112-212 (SEQ ID NO:2436), DOM9-112-213 (SEQ ID NO:2437), DOM9-112-214 (SEQ ID NO:2438), DOM9-112-215 (SEQ ID NO:2439), DOM9-112-216 (SEQ ID NO:2440), DOM9-112-217 (SEQ ID NO:2441), DOM9-112-218 (SEQ ID NO:2442), DOM9-112-219 (SEQ ID NO:2443), DOM9-112-220 (SEQ ID NO:2444), DOM9-112-221 (SEQ ID NO:2445), DOM9-112-222 (SEQ ID NO:2446), DOM9-112-223 (SEQ ID NO:2447), DOM9-112-224 (SEQ ID NO:2448), DOM9-112-225 (SEQ ID NO:2449), DOM9-112-226 (SEQ ID NO:2450), DOM9-112-227 (SEQ ID NO:2451), DOM9-112-228 (SEQ ID NO:2452), DOM9-112-229 (SEQ ID NO:2453), DOM9-112-230 (SEQ ID NO:2454), DOM9-112-231 (SEQ ID NO:2455), DOM9-112-233 (SEQ ID NO:1734), DOM9-112-232 (SEQ ID NO:1733) and DOM9-112-234 (SEQ ID NO:1735).

[0236] In some embodiments, the polypeptide domain that has a binding site with binding specificity for IL-4 (e.g. a dAb) comprises an amino acid sequence that has at least about 80%, at least about 85%, at least about 90%, at least about 91%, at least about 92%, at least about 93%, at least about 94%, at least about 95%, at least about 96%, at least about 97%, at least about 98%, or at least about 99% amino acid sequence identity with the amino acid sequence or a dAb selected from the group consisting of DOM9-15 (SEQ ID NO:175), DOM9-17(SEQ ID NO:176), DOM9-23 (SEQ ID NO:177), DOM9-24 (SEQ ID NO:178), DOM9-25 (SEQ ID NO:179), DOM9-27 (SEQ ID NO:180), DOM9-28 (SEQ ID NO:181), DOM9-29 (SEQ ID NO:182), DOM9-30 (SEQ ID NO:183), DOM9-31 (SEQ ID NO:184), DOM9-32 (SEQ ID NO:185), DOM9-33 (SEQ ID NO:186), DOM9-50 (SEQ ID NO:187), DOM9-57 (SEQ ID NO:188), DOM9-59 (SEQ ID NO:189), DOM9-63 (SEQ ID NO:190), DOM9-67 (SEQ ID NO:191), DOM9-68 (SEQ ID NO:192), DOM9-70 (SEQ ID NO:193), DOM9-79 (SEQ ID NO:194), DOM9-82 (SEQ ID NO: 195), DOM9-86 (SEQ ID NO:196), DOM9-94 (SEQ ID NO:197), DOM9-108 (SEQ ID NO:198), DOM9-112 (SEQ ID NO:199), DOM9-112-1 (SEQ ID NO:200), DOM9-112-2 (SEQ ID NO:201), DOM9-112-3 (SEQ ID NO:202), DOM9-112-4 (SEQ ID NO:203), DOM9-112-5 (SEQ ID NO:204), DOM9-112-6 (SEQ ID NO:205), DOM9-112-7 (SEQ ID NO:206), DOM9-112-8 (SEQ ID NO:207), DOM9-112-9 (SEQ ID NO:208), DOM9-112-10 (SEQ ID NO:209), DOM9-112-11 (SEQ ID NO:210), DOM9-112-12 (SEQ ID NO:211), DOM9-112-13 (SEQ ID NO:212), DOM9-112-14 (SEQ ID NO:213), DOM9-112-15 (SEQ ID NO:214), DOM9-112-16 (SEQ ID NO:215), DOM9-112-17 (SEQ ID NO:216), DOM9-112-18 (SEQ ID NO:217), DOM9-112-19 (SEQ ID NO:218), DOM9-112-20 (SEQ ID NO:219), DOM9-112-21 (SEQ ID NO:220), DOM9-112-22 (SEQ ID NO:221), DOM9-112-23 (SEQ ID NO:222), DOM9-112-25 (SEQ ID NO:223), DOM9-112-81 (SEQ ID NO:224), DOM9-112-82 (SEQ ID NO:225), DOM9-112-83 (SEQ ID NO:226), DOM9-112-84 (SEQ ID NO:227), DOM9-112-85 (SEQ ID NO:228), DOM9-112-86 (SEQ ID NO:229), DOM9-112-87 (SEQ ID NO:230), DOM9-112-88 (SEQ ID NO:231), DOM9-112-89 (SEQ ID NO:232), DOM9-112-90 (SEQ ID NO:233), DOM9-112-91 (SEQ ID NO:234), DOM9-112-92 (SEQ ID NO:235), DOM9-112-93 (SEQ ID NO:236), DOM9-112-94 (SEQ ID NO:237), DOM9-112-95 (SEQ ID NO:238), DOM9-112-96 (SEQ ID NO:239), DOM9-112-97 (SEQ ID NO:240), DOM9-112-98 (SEQ ID NO:241), DOM9-112-99 (SEQ ID NO:242), DOM9-112-100 (SEQ ID NO:243), DOM9-112-101 (SEQ ID NO:244), DOM9-1132-102 (SEQ ID NO:245), DOM9-112-103 (SEQ ID NO:246), DOM9-112-104 (SEQ ID NO:247), DOM9-112-105 (SEQ ID NO:248), DOM9-112-106 (SEQ ID NO:249), DOM9-112-107 (SEQ ID NO:250), DOM9-112-108 (SEQ ID NO:251), DOM9-112-109 (SEQ ID NO:252), DOM9-112-110 (SEQ ID NO:253), DOM9-112-111 (SEQ ID NO:254), DOM9-112-112 (SEQ ID NO:255), DOM9-112-113 (SEQ ID NO:256), DOM9-112-114 (SEQ ID NO:257), DOM9-112-115 (SEQ ID NO:258), DOM9-112-116 (SEQ ID NO:259), DOM9-112-117 (SEQ ID NO:260), DOM9-112-118 (SEQ ID NO:261), DOM9-112-119 (SEQ ID NO:262), DOM9-112-120 (SEQ ID NO:263), DOM9-112-121 (SEQ ID NO:264), DOM9-112-122 (SEQ ID NO:265), DOM9-112-123 (SEQ ID NO:266), DOM9-112-124 (SEQ ID NO:267), DOM9-112-125 (SEQ ID NO:268), DOM9-112-126 (SEQ ID NO:269), DOM9-112-127 (SEQ ID NO:270), DOM9-112-128 (SEQ ID NO:271), DOM9-112-134 (SEQ ID NO:272), DOM9-112-135 (SEQ ID NO:273), DOM9-112-136 (SEQ ID NO:274), DOM9-112-137 (SEQ ID NO:275), DOM9-112-138 (SEQ ID NO:276), DOM9-112-340 (SEQ ID NO:277), DOM9-112-141 (SEQ ID NO:278), DOM9-112-142 (SEQ ID NO:279), DOM9-112-143 (SEQ ID NO:280), DOM9-112-144 (SEQ ID NO:281), DOM9-112-145 (SEQ ID NO:282), DOM9-112-146 (SEQ ID NO:283), DOM9-112-147 (SEQ ID NO:284), DOM9-112-148 (SEQ ID NO:285), DOM9-112-149 (SEQ ID NO:286), DOM9-112-150 (SEQ ID NO:287), DOM9-112-151 (SEQ ID NO:288), DOM9-112-152 (SEQ ID NO:289), DOM9-112-153 (SEQ ID NO:290), DOM9-112-154 (SEQ ID NO:291), DOM9-112-155 (SEQ ID NO:292), DOM9-112-156 (SEQ ID NO:293), DOM9-112-157 (SEQ ID NO:294), DOM9-112-158 (SEQ ID NO:295), DOM9-112-159 (SEQ ID NO:296), DOM9-112-160 (SEQ ID NO:297), DOM9-112-161 (SEQ ID NO:298), DOM9-112-162 (SEQ ID NO:299), DOM9-112-163 (SEQ ID NO:300), DOM9-112-164 (SEQ ID NO:301), DOM9-112-165 (SEQ ID NO:302), DOM9-112-166 (SEQ ID NO:303), DOM9-112-167 (SEQ ID NO:304), DOM9-112-168 (SEQ ID NO:305), DOM9-112-169 (SEQ ID NO:306), DOM9-112-170 (SEQ ID NO:307), DOM9-112-171 (SEQ ID NO:308), DOM9-112-172 (SEQ ID NO:309), DOM9-112-173 (SEQ ID NO:310), DOM9-112-174 (SEQ ID NO:311), DOM9-112-175 (SEQ ID NO:312), DOM9-112-176 (SEQ ID NO:313), DOM9-112-177 (SEQ ID NO:314), DOM9-112-178 (SEQ ID NO:315), DOM9-112-179 (SEQ ID NO:316), DOM9-112-180 (SEQ ID NO:317), DOM9-112-181 (SEQ ID NO:318), DOM9-112-182 (SEQ ID NO:319), DOM9-112-183 (SEQ ID NO:320), DOM9-112-184 (SEQ ID NO:321), DOM9-112-185 (SEQ ID NO:322), DOM9-112-186 (SEQ ID NO:323), DOM9-112-187 (SEQ ID NO:324), DOM9-112-188 (SEQ ID NO:325), DOM9-112-189 (SEQ ID NO:326), DOM9-112-190 (SEQ ID NO:327), DOM9-112-191 (SEQ ID NO:328), DOM9-112-192 (SEQ ID NO:329), DOM9-112-193 (SEQ ID NO:330), DOM9-112-194 (SEQ ID NO:331), DOM9-112-195 (SEQ ID NO:332), DOM9-112-196 (SEQ ID NO:333), DOM9-112-197 (SEQ ID NO:334), DOM9-112-198 (SEQ ID NO:335), DOM9-112-199 (SEQ ID NO:336), DOM9-112-200 (SEQ ID NO:337), DOM9-112-201 (SEQ ID NO:338), DOM9-112-202 (SEQ ID NO:339), DOM9-120 (SEQ ID NO:340), DOM9-121 (SEQ ID NO:341), DOM9-122 (SEQ ID NO:342), DOM9-123 (SEQ ID NO:343), DOM9-124 (SEQ ID NO:344), DOM9-125 (SEQ ID NO:345), DOM9-128 (SEQ ID NO:346), DOM9-134 (SEQ ID NO:347), DOM9-136 (SEQ ID NO:348), DOM9-26 (SEQ ID NO:500), DOM9-35 (SEQ ID NO:501), DOM9-36 (SEQ ID NO:502), DOM9-37 (SEQ ID NO:503), DOM9-38 (SEQ ID NO:504), DOM9-39 (SEQ ID NO:505), DOM9-40 (SEQ ID NO:506), DOM9-41 (SEQ ID NO:507), DOM9-43 (SEQ ID NO:508), DOM9-44 (SEQ ID NO:509), DOM9-44-500 (SEQ ID NO:510), DOM9-44-501 (SEQ ID NO:511), DOM9-44-502 (SEQ ID NO:512), DOM9-44-503 (SEQ ID NO:513), DOM9-44-504 (SEQ ID NO:514), DOM9-44-505 (SEQ ID NO:515), DOM9-44-506 (SEQ ID NO:516), DOM9-44-507 (SEQ ID NO:517), DOM9-44-509 (SEQ ID NO:518), DOM9-44-510 (SEQ ID NO:519), DOM9-44-511 (SEQ ID NO:520), DOM9-44-512 (SEQ ID NO:521), DOM9-44-513 (SEQ ID NO:522), DOM9-44-514 (SEQ ID NO:523), DOM9-44-515 (SEQ ID NO:524), DOM9-44-516 (SEQ ID NO:525), DOM9-44-517 (SEQ ID NO:526), DOM9-44-518 (SEQ ID NO:527), DOM9-44-519 (SEQ ID NO:528), DOM9-44-520 (SEQ ID NO:529), DOM9-44-521 (SEQ ID NO:530), DOM9-44-522 (SEQ ID NO:531), DOM9-44-523 (SEQ ID NO:532), DOM9-44-524 (SEQ ID NO:533), DOM9-44-525 (SEQ ID NO:534), DOM9-44-526 (SEQ ID NO:535), DOM9-44-527 (SEQ ID NO:536), DOM9-44-528 (SEQ ID NO:537), DOM9-44-529 (SEQ ID NO:538), DOM9-44-530 (SEQ ID NO:539), DOM9-44-531 (SEQ ID NO:540), DOM9-44-532 (SEQ ID NO:541), DOM9-44-533 (SEQ ID NO:542), DOM9-44-534 (SEQ ID NO:543), DOM9-44-535 (SEQ ID NO:544), DOM9-44-536 (SEQ ID NO:545), DOM9-44-537 (SEQ ID NO:546), DOM9-44-538 (SEQ ID NO:547), DOM9-44-539 (SEQ ID NO:548), DOM9-44-540 (SEQ ID NO:549), DOM9-44-541 (SEQ ID NO:550), DOM9-44-542 (SEQ ID NO:551), DOM9-44-543 (SEQ ID NO:552), DOM9-44-544 (SEQ ID NO:553), DOM9-44-545 (SEQ ID NO:554), DOM9-44-546 (SEQ ID NO:555), DOM9-44-547 (SEQ ID NO:556), DOM9-44-548 (SEQ ID NO:557), DOM9-44-549 (SEQ ID NO:558), DOM9-44-550 (SEQ ID NO:559), DOM9-44-551 (SEQ ID NO:560), DOM9-44-552 (SEQ ID NO:561), DOM9-44-553 (SEQ ID NO:562), DOM9-44-554 (SEQ ID NO:563), DOM9-44-555 (SEQ ID NO:564), DOM9-44-556 (SEQ ID NO:565), DOM9-44-557 (SEQ ID NO:566), DOM19-44-558 (SEQ ID NO:567), DOM9-44-559 (SEQ ID NO:568), DOM9-44-560 (SEQ ID NO:569), DOM9-44-561 (SEQ ID NO:570), DOM9-44-562 (SEQ ID NO:571), DOM9-44-563 (SEQ ID NO:572), DOM9-44-564 (SEQ ID NO:573), DOM9-44-565 (SEQ ID NO:574), DOM9-44-566 (SEQ ID NO:575), DOM9-44-625 (SEQ ID NO:576), DOM9-44-626 (SEQ ID NO:577), DOM9-44-627 (SEQ ID NO:578), DOM9-44-628 (SEQ ID NO:579), DOM9-44-629 (SEQ ID NO:580), DOM9-44-630 (SEQ ID NO:581), DOM9-44-631 (SEQ ID NO:582), DOM9-44-632 (SEQ ID NO:583), DOM9-44-633 (SEQ ID NO:584), DOM9-44-634 (SEQ ID NO:585), DOM9-44-636 (SEQ ID NO:586), DOM9-44-637 (SEQ ID NO:587), DOM9-44-639 (SEQ ID NO:588), DOM9-44-640 (SEQ ID NO:589), DOM9-44-641(SEQ ID NO:590), DOM9-44-642 (SEQ ID NO:591), DOM9-44-643 (SEQ ID NO:592), DOM9-44-644 (SEQ ID NO:593), DOM9-45 (SEQ ID NO:594), DOM9-46 (SEQ ID NO:595), DOM9-47 (SEQ ID NO:596), DOM9-48 (SEQ ID NO:597), DOM9-143 (SEQ NO:598), DOM9-144 (SEQ ID NO:599), DOM9-146 (SEQ ID NO:600), DOM9-152 (SEQ ID NO:601), DOM9-155 (SEQ ID NO:602), DOM9-155-001 (SEQ ID NO:603), DOM9-155-3 (SEQ ID NO:604), DOM9-155-5 (SEQ ID NO:605), DOM9-155-8 (SEQ ID NO:606), DOM9-155-9 (SEQ ID NO:607), DOM9-155-11 (SEQ ID NO:608), DOM9-155-13 (SEQ ID NO:609), DOM9-155-14 (SEQ ID NO:610), DOM9-155-17 (SEQ ID NO:611), DOM9-155-19 (SEQ ID NO:612), DOM9-155-20 (SEQ ID NO:613), DOM9-155-22 (SEQ ID NO:614), DOM9-155-23 (SEQ ID NO:615), DOM9-155-24 (SEQ ID NO:616), DOM9-155-25 (SEQ ID NO:617), DOM9-155-26 (SEQ ID NO:618), DOM9-155-27 (SEQ ID NO:619), DOM9-155-28 (SEQ ID NO:620), DOM9-155-29 (SEQ ID NO:621), DOM9-155-30 (SEQ ID NO:622), DOM9-155-31 (SEQ ID NO:623), DOM9-155-32 (SEQ ID NO:624), DOM9-155-33 (SEQ ID NO:625), DOM9-155-34 (SEQ ID NO:626), DOM9-155-35 (SEQ ID NO:627), DOM9-155-36 (SEQ ID NO:628), DOM9-155-37 (SEQ ID NO:629), DOM9-155-38 (SEQ ID NO:630), DOM9-155-39 (SEQ ID NO:631), DOM9-155-41 (SEQ ID NO:632), DOM9-155-42 (SEQ ID NO:633), DOM9-155-43 (SEQ ID NO:634), DOM9-155-44 (SEQ ID NO:635), DOM9-155-45(SEQ ID NO:636), DOM9-155-46 (SEQ ID NO:637), DOM9-155-47 (SEQ ID NO:638), DOM9-155-48 (SEQ ID NO:639), DOM9-155-49 (SEQ ID NO:640), DOM9-155-50 (SEQ ID NO:641), DOM9-155-51 (SEQ ID NO:642), DOM9-155-52 (SEQ ID NO:643), DOM9-155-53 (SEQ ID NO:644), DOM9-158 (SEQ ID NO:645), DOM9-160 (SEQ ID NO:646), DOM9-161 (SEQ ID NO:647), DOM9-162 (SEQ ID NO:648), DOM9-163 (SEQ ID NO:649) and DOM9-164 (SEQ ID NO:650).

[0237] In some embodiments, the polypeptide domain that has a binding site with binding specificity for IL-4 (e.g. a dAb) comprises an amino acid sequence that has at least about 80%, at least about 85%, at least about 90%, at least about 91%, at least about 92%, at least about 93%, at least about 94%, at least about 95%, at least about 96%, at least about 97%, at least about 98%, or at least about 99% amino acid sequence identity with the amino acid sequence or a dAb selected from the group consisting of DOM9-155-77 (SEQ ID NO:2426), DOM9-155-78 (SEQ ID NO:2427), DOM9-112-204 (SEQ ID NO:2428), DOM9-112-205 (SEQ ID NO:2429), DOM9-112-206 (SEQ ID NO:2430), DOM9-112-207 (SEQ ID NO:2431), DOM9-112-208 (SEQ ID NO:2432), DOM9-112-209 (SEQ ID NO:2433), DOM9-112-210 (SEQ ID NO:2434), DOM9-112-211 (SEQ ID NO:2435), DOM9-112-212 (SEQ ID NO:2436), DOM9-112-213 (SEQ ID NO:2437), DOM9-112-214 (SEQ ID NO:2438), DOM9-112-215 (SEQ ID NO:2439), DOM9-112-216 (SEQ ID NO:2440), DOM9-112-217 (SEQ ID NO:2441), DOM9-112-218 (SEQ ID NO:2442), DOM9-112-219 (SEQ ID NO:2443), DOM9-112-220 (SEQ ID NO:2444), DOM9-112-221 (SEQ ID NO:2445), DOM9-112-222 (SEQ ID NO:2446), DOM9-112-223 (SEQ ID NO:2447), DOM9-112-224 (SEQ ID NO:2448), DOM9-112-225 (SEQ ID NO:2449), DOM9-112-226 (SEQ ID NO:2450), DOM9-112-227 (SEQ ID NO:2451), DOM9-112-228 (SEQ ID NO:2452), DOM9-112-229 (SEQ ID NO:2453), DOM9-112-230 (SEQ ID NO:2454), DOM9-112-231 (SEQ ID NO:2455), DOM9-112-233 (SEQ ID NO:1734), DOM9-112-232 (SEQ ID NO:1733) and DOM9-112-234 (SEQ ID NO:1735).

[0238] In preferred embodiments, the polypeptide domain that has a binding site with binding specificity for IL-4 comprises an amino acid sequence that has at least about 90%, at least about 91%, at least about 92%, at least about 93%, at least about 94%, at least about 95%, at least about 96%, at least about 97%, at least about 98%, or at least about 99% amino acid sequence identity with the amino acid sequence or a dAb selected from the group consisting of DOM9-112-155 (SEQ ID NO:292), DOM9-112-168 (SEQ ID NO:305), DOM9-112-174 (SEQ ID NO:311), DOM9-112-199 (SEQ ID NO:336), DOM9-112-200 (SEQ ID NO:337), DOM9-44-502 (SEQ ID NO:512), DOM9-155-5 (SEQ ID NO:605), DOM9-155-25 (SEQ ID NO:617), DOM9-155-77 (SEQ ID NO:2426), DOM9-155-78 (SEQ ID NO:2427), DOM9-112-202 (SEQ ID NO:339), DOM9-112-209 (SEQ ID NO:2433), DOM9-112-210 (SEQ ID NO:2434) and DOM9-44-502 (SEQ ID NO:512). For example, the polypeptide domain that has a binding site with binding specificity for IL-4 can comprise DOM9-112-155 (SEQ ID NO:292), DOM9-112-168 (SEQ ID NO:305), DOM9-112-174 (SEQ ID NO:311), DOM9-112-199 (SEQ ID NO:336), DOM9-112-200 (SEQ ID NO:337), DOM9-44-502 (SEQ ID NO:512), DOM9-155-5 (SEQ ID NO:605, DOM9-155-25 (SEQ ID NO:617), DOM9-155-77 (SEQ ID NO:2426), DOM9-155-78 (SEQ ID NO:2427), DOM9-112-202 (SEQ ID NO:339), DOM9-112-209 (SEQ ID NO:2433), DOM9-112-210 (SEQ ID NO:2434) and DOM9-44-502 (SEQ ID NO:512).

[0239] In some embodiments, the polypeptide domain that has a binding site with binding specificity for IL-4 competes with any of the dAbs disclosed herein for binding to IL-4.

[0240] Preferably the polypeptide domain that has a binding site with binding specificity for IL-4 is an immunoglobulin single variable domain. The polypeptide domain that has a binding site with binding specificity for IL-4 can comprise any suitable immunoglobulin variable domain, and preferably comprises a human variable domain or a variable domain that comprises human framework regions. In certain embodiments, the polypeptide domain that has a binding site with binding specificity for IL-4 comprises a universal framework, as described herein.

[0241] The universal framework can be a V_{L} framework (Vλ or Vκ), such as a framework that comprises the framework amino acid sequences encoded by the human germline DPK1, DPK2, DPK3, DPK4, DPK5, DPK6, DPK7, DPK8, DPK9, DPK10, DPK12, DPK1.3, DPK15, DPK16, DPK18, DPK19, DPK20, DPK21, DPK22, DPK23, DPK24, DPK25, DPK26 or DPK28 immunoglobulin gene segment. If desired, the V_{L} framework can further comprise the framework amino acid sequence encoded by the human germline J_{κ}1, J_{κ}2, J_{κ}3, J_{κ}4, or J_{κ}5, immunoglobulin gene segment.

[0242] In other embodiments the universal framework can be a V_{H} framework, such as a framework that comprises the framework amino acid sequences encoded by the human germline DP4, DP7, DP8, DP9, DP10, DP31, DP33, DP38, DP45, DP46, DP47, DP49, DP50, DP51, DP53, DP54, DP65, DP66, DP67, DP68 or DP69 immunoglobulin gene segment. If desired, the V_{H} framework can further comprise the framework amino acid sequence encoded by the human germline J_{H}1, J_{H}2, J_{H}3, J_{H}4, J_{H}4b, J_{H}5, and J_{H}6, immunoglobulin gene segment.

[0243] In certain embodiments, the polypeptide domain that has a binding site with binding specificity for IL-4 comprises one or more framework regions comprising an amino acid sequence that is the same as the amino acid sequence of a corresponding framework region encoded by a human germline antibody gene segment, or the amino acid sequences of one or more of said framework regions collectively comprise up to 5 amino acid differences relative to the amino acid sequence of said corresponding framework region encoded by a human germline antibody gene segment.

[0244] In other embodiments, the amino acid sequences of FW1, FW2, FW3 and FW4 of the polypeptide domain that have a binding site with binding specificity for IL-4 are the same as the amino acid sequences of corresponding framework regions encoded by a human germline antibody gene segment, or the amino acid sequences of FW1, FW2, FW3 and FW4 collectively contain up to 10 amino acid differences relative to the amino acid sequences of corresponding framework regions encoded by said human germline antibody gene segment.

[0245] In other embodiments, the polypeptide domain that has a binding site with binding specificity for IL-4 comprises FW1., FW2 and FW3 regions, and the amino acid sequence of said FW1, FW2 and FW3 regions are the same as the amino acid sequences of corresponding framework regions encoded by human germline antibody gene segments.

[0246] In particular embodiments, the polypeptide domain that has a binding site with binding specificity for IL-4 comprises the DPK9 V_{L} framework, or a V_{H} framework selected from the group consisting of DP47, DP45 and DP38. The polypeptide domain that has a binding site with binding specificity for IL-4 can comprise a binding site for a generic ligand, such as protein A, protein L and protein. G.

[0247] The ligand of the invention (e.g., ligand that has binding specificity for IL-4 and IL-13, ligand that has binding specificity for IL-4) can comprise a non-immunoglobulin binding moiety that has binding specificity for IL-4 and preferably inhibits a function of IL-4 (e.g., binding to receptor), wherein the non-immunoglobulin binding moiety comprises one, two or three of the CDRs of a V_{H}, V_{L} or V_{HH} that binds IL-4 and a suitable scaffold. In certain embodiments, the non-immunoglobulin binding moiety comprises CDR3 but not CDR1 or CDR2 of a V_{H}, V_{L} or V_{HH} that binds IL-4 and a suitable scaffold. In other embodiments, the non-immunoglobulin binding moiety comprises CDR1 and CDR2, but not CDR3 of a V_{H}, V_{L} or V_{HH} that binds IL-4 and a suitable scaffold. In other embodiments, the non-immunoglobulin binding moiety comprises CDR1, CDR2 and CDR3 of a V_{H}, V_{L} or V_{HH} that binds IL-4 and a suitable scaffold. Preferably, the CDR or CDRs of the ligand of these embodiments is a CDR or CDRs of an anti-IL-4 dAb described herein. Preferably, the non-immunoglobulin binding moiety comprises one, two, or three of the CDRs of one of the anti-IL-4 dAbs disclosed herein. In other embodiments, the ligand (e.g., ligand that has binding specificity for IL-4 and IL-13, ligand that has binding specificity for IL-4) comprises only CDR3 of a V_{H}, V_{L} or V_{HH} that binds IL-4. The non-immunoglobulin domain can comprise an amino acid sequence that has one or more regions that have sequence identity to one, two or three of the CDRs of an anti-IL-4 dAb described herein. For example, the non-immunoglobulin domain can have an amino acid sequence that contains at least about 50%, at least about 60%, at least about 70%, at least about 80%, or at least about 90% sequence identity with CDR1, CDR2 and/or CDR3 of an anti-IL-4 dAb disclosed herein. Even more preferably, the non-immunoglobulin binding moiety comprises one, two, or three of the CDRs of DOM9-44-502 (SEQ ID NO:512), DOM9-155-5 (SEQ ID NO:605), DOM9-155-25 (SEQ ID NO:617), DOM9-112-155 (SEQ ID NO:292), DOM9-112-168 (SEQ ID NO:305), DOM9-112-174 (SEQ ID NO:311), DOM9-112-199 (SEQ ID NO:336), and DOM9-112-200 (SEQ ID NO:337).

[0248] In certain embodiments, the polypeptide domain that has a binding site with binding specificity for IL-4 is substantially resistant to aggregation. For example, in some embodiments, less than about 10%, less than about 9%, less than about 8%, less than about 7%, less than about 6%, less than about 5%, less than about 4%, less than about 3%, less than about 2% or less than about 1% of the polypeptide domain that has a binding site with binding specificity for IL-4 aggregates when a 1-5 mg/ml, 5-10 mg/ml, 10-20 mg/ml, 20-50 mg/ml, 50-100 mg/ml, 100-200 mg/ml or 200-500 mg/ml solution of ligand or dAb in a solvent that is routinely used for drug formulation such as saline, buffered saline, citrate buffer saline, water, an emulsion, and, any of these solvents with an acceptable excipient such as those approved by the FDA, is maintained at about 22° C., 22-25° C., 25-30° C., 30-37° C., 37-40° C., 40-50° C., 50-60° C., 60-70° C., 70-80° C., 15-20° C., 10-15° C., 5-10° C., 2-5° C., 0-2° C., −10° C. to 0° C., −20° C. to −10° C., −40° C. to −20° C., −60° C. to −40° C., or −80° C. to −60° C., for a period of about time, for example, 10 minutes, 1 hour, 8 hours, 24 hours, 2 days, 3 days, 4 days, 1 week, 2 weeks, 3 weeks, 1 month, 2 months, 3 months, 4 months, 6 months, 1 year, or 2 years.

[0249] Aggregation can be assessed using any suitable method, such as, by microscopy, assessing turbidity of a solution by visual inspection or spectroscopy or any other suitable method. Preferably, aggregation is assessed by dynamic light scattering. Polypeptide domains that have a binding site with binding specificity for IL-4 that are resistant to aggregation provide several advantages. For example, such polypeptide domains that have a binding site with binding specificity for IL-4 can readily be produced in high yield as soluble proteins by expression using a suitable biological production system, such as E. coli, and can be formulated and/or stored at higher concentrations than conventional polypeptides, and with less aggregation and loss of activity.

[0250] In addition, the polypeptide domain that has a binding site with binding specificity for IL-4 that is resistant to aggregation can be produced more economically than other antigen- or epitope-binding polypeptides (e.g., conventional antibodies). For example, generally, preparation of antigen- or epitope-binding polypeptides intended for in vivo applications includes processes (e.g., gel filtration) that remove aggregated polypeptides. Failure to remove such aggregates can result in a preparation that is not suitable for in vivo applications because, for example, aggregates of an antigen-binding polypeptide that is intended to act as an antagonist can function as an agonist by inducing cross-linking or clustering of the target antigen. Protein aggregates can also reduce the efficacy of therapeutic polypeptide by inducing an immune response in the subject to which they are administered.

[0251] In contrast, the aggregation resistant polypeptide domain that has a binding site with binding specificity for IL-4 of the invention can be prepared for in vivo applications without the need to include process steps that remove aggregates, and can be used in in vivo applications without the aforementioned disadvantages caused by polypeptide aggregates.

[0252] In some embodiments, a polypeptide domain that has a binding site with binding specificity for IL-4 unfolds reversibly when heated to a temperature (Ts) and cooled to a temperature (Tc), wherein Ts is greater than the melting temperature (Tm) of the polypeptide domain that has a binding site with binding specificity for IL-4, and Tc is lower than the melting temperature of the polypeptide domain that has a binding site with binding specificity for IL-4. For example, a polypeptide domain that has a binding site with binding specificity for IL-4 can unfold reversibly when heated to 80° C. and cooled to about room temperature. A polypeptide that unfolds reversibly loses function when unfolded but regains function upon refolding. Such polypeptides are distinguished from polypeptides that aggregate when unfolded or that improperly refold (misfolded polypeptides), i.e., do not regain function.

[0253] Polypeptide unfolding and refolding can be assessed, for example, by directly or indirectly detecting polypeptide structure using any suitable method. For example, polypeptide structure can be detected by circular dichroism (CD) (e.g., far-UV CD, near-UV CD), fluorescence (e.g., fluorescence of tryptophan side chains), susceptibility to proteolysis, nuclear magnetic resonance (NMR), or by detecting or measuring a polypeptide function that is dependent upon proper folding (e.g., binding to target ligand, binding to generic ligand). In one example, polypeptide unfolding is assessed using a functional assay in which loss of binding function (e.g., binding a generic and/or target ligand, binding a substrate) indicates that the polypeptide is unfolded.

[0254] The extent of unfolding and refolding of a polypeptide domain that has a binding site with binding specificity for IL-4 can be determined using an unfolding or denaturation curve. An unfolding curve can be produced by plotting temperature as the ordinate and the relative concentration of folded polypeptide as the abscissa. The relative concentration of folded polypeptide domain that has a binding site with binding specificity for IL-4 can be determined directly or indirectly using any suitable method (e.g., CD, fluorescence, binding assay). For example, a polypeptide domain that has a binding site with binding specificity for IL-4 solution can be prepared and ellipticity of the solution determined by CD. The ellipticity value obtained represents a relative concentration of folded ligand or dAb monomer of 100%. The polypeptide domain that has a binding site with binding specificity for IL-4 in the solution is then unfolded by incrementally raising the temperature of the solution and ellipticity is determined at suitable increments (e.g., after each increase of one degree in temperature). The polypeptide domain that has a binding site with binding specificity for IL-4 in solution is then refolded by incrementally reducing the temperature of the solution and ellipticity is determined at suitable increments. The data can be plotted to produce an unfolding curve and a refolding curve. The unfolding and refolding curves have a characteristic sigmoidal shape that includes a portion in which the polypeptide domain that has a binding site with binding specificity for IL-4 molecules is folded, an unfolding/refolding transition in which the polypeptide domain that has a binding site with binding specificity for IL-4 molecules is unfolded to various degrees, and a portion in which polypeptide domain that has a binding site with binding specificity for IL-4 is unfolded. The y-axis intercept of the refolding curve is the relative amount of refolded polypeptide domain that has a binding site with binding specificity for IL-4 recovered. A recovery of at least about 50%, or at least about 60%, or at least about 70%, or at least about 75%, or at least about 80%, or at least about 85%, or at least about 90%, or at least about 95% is indicative that the ligand or dAb monomer unfolds reversibly.

[0255] In a preferred embodiment, reversibility of unfolding of polypeptide domain that has a binding site with binding specificity for IL-4 is determined by preparing a polypeptide domain that has a binding site with binding specificity for IL-4 solution and plotting heat unfolding and refolding curves. The polypeptide domain that has a binding site with binding specificity for IL-4 solution can be prepared in any suitable solvent, such as an aqueous buffer that has a pH suitable to allow polypeptide domain that has a binding site with binding specificity for IL-4 to dissolve (e.g., pH that is about 3 units above or below the isoelectric point (pI)). The polypeptide domain that has a binding site with binding specificity for IL-4 solution is concentrated enough to allow unfolding/folding to be detected. For example, the ligand or dAb monomer solution can be about 0.1 μM to about 100 μM, or preferably about 1 μM to about 10 μM.

[0256] If the melting temperature (Tm) of the polypeptide domain that has a binding site with binding specificity for IL-4 is known, the solution can be heated to about ten degrees below the Tm (Tm-10) and folding assessed by ellipticity or fluorescence (e.g., far-UV CD scan from 200 nm to 250 nm, fixed wavelength CD at 235 nm or 225 nm; tryptophan fluorescent emission spectra at 300 to 450 nm with excitation at 298 nm) to provide 100% relative folded ligand or dAb monomer. The solution is then heated to at least ten degrees above Tm (Tm+10) in predetermined increments (e.g., increases of about 0.1 to about 1 degree), and ellipticity or fluorescence is determined at each increment. Then, the polypeptide domain that has a binding site with binding specificity for IL-4 is refolded by cooling to at least Tm-10 in predetermined increments and ellipticity or fluorescence determined at each increment. If the melting temperature of the polypeptide domain that has a binding site with binding specificity for IL-4 is not known, the solution can be unfolded by incrementally heating from about 25° C. to about 100° C. and then refolded by incrementally cooling to at least about 25° C., and ellipticity or fluorescence at each heating and cooling increment is determined. The data obtained can be plotted to produce an unfolding curve and a refolding curve, in which the y-axis intercept of the refolding curve is the relative amount of refolded protein recovered. In some embodiments, the polypeptide domain that has a binding site with binding specificity for VEGF does not comprise a Camelid immunoglobulin variable domain, or one or more framework amino acids that are unique to immunoglobulin variable domains encoded by Camelid germline antibody gene segments.

[0257] Preferably, the polypeptide domain that has a binding site with binding specificity for IL-4 is secreted in a quantity of at least about 0.5 mg/L when expressed in E. coli or in Pichia species (e.g., P. pastoris). In other preferred embodiments, polypeptide domain that has a binding site with binding specificity for IL-4 is secreted in a quantity of at least about 0.75 mg/L, at least about 1 mg/L, at least about 4 mg/L, at least about 5 mg/L, at least about 10 mg/L, at least about 15 mg/L, at least about 20 mg/L, at least about 25 mg/L, at least about 30 mg/L, at least about 35 mg/L, at least about 40 mg/L, at least about 45 mg/L, or at least about 50 mg/L, or at least about 100 mg/L, or at least about 200 mg/L, or at least about 300 mg/L, or at least about 400 mg/L, or at least about 500 mg/L, or at least about 600 mg/L, or at least about 700 mg/L, or at least about 800 mg/L, at least about 900 mg/L, or at least about 1 g/L when expressed in E. coli or in Pichia species (e.g., P. pastoris). In other preferred embodiments, a polypeptide domain that has a binding site with binding specificity for IL-4 is secreted in a quantity of at least about 1 mg/L to at least about 1 g/L, at least about 1 mg/L to at least about 750 mg/L, at least about 100 mg/L to at least about 1 g/L, at least about 200 mg/L to at least about 1 g/L, at least about 300 mg/L to at least about 1 g/L, at least about 400 mg/L to at least about 1 g/L, at least about 500 mg/L to at least about 1 g/L, at least about 600 mg/L to at least about 1 g/L, at least about 700 mg/L to at least about 1 g/L, at least about 800 mg/L to at least about 1 g/L, or at least about 900 mg/L to at least about 1 g/L when expressed in E, coli or in Pichia species (e.g., P. pastoris). Although, polypeptide domain that has a binding site with binding specificity for IL-4 described herein can be secretable when expressed in E. coli or in Pichia species (e.g., P. pastoris), they can be produced using any suitable method, such as synthetic chemical methods or biological production methods that do not employ E. coli or Pichia species.

Polypeptide Domains that Bind IL-13

[0258] The invention provides polypeptide domains (e.g., dAb) that have a binding site with binding specificity for IL-13. In preferred embodiments, the polypeptide domain (e.g., dAb) binds to IL-13 with an affinity (KD; KD=K_{off}(kd)/Kₒₙ (ka)) of 300 nM to 1 pM (i.e., 3×10⁻⁷ to 5×10⁻¹²M), preferably 100 nM to 1 pM, or 50 nM to 10 pM, more preferably 10 nM to 100 pM and most preferably about 1 nM, for example a K_{D} of 1×10⁻⁷ M or less, preferably 1×10⁻⁸ M or less, more preferably about 1×10⁻⁹ M or less, 1×10⁻¹° M or less or 1×10⁻¹¹ M or less; and/or a K_{off} rate constant of 5×10⁻¹ s⁻¹ to 1×10⁻⁷ s⁻¹, preferably 1×10⁻² s⁻¹ to 1×10⁻⁶ s⁻¹, more preferably 5×10⁻³ s⁻¹ to 1×10⁻⁵ s⁻¹, for example 5×10⁻¹ s⁻¹ or less, preferably 1×10⁻² s⁻¹ or less, advantageously 1×10⁻³ s⁻¹ or less, more preferably 1×10⁻⁴ s⁻¹ or less, still more preferably 1×10⁻⁵ s⁻¹ or less, and most preferably 1×10⁻⁶ s⁻¹ or less as determined by surface plasmon resonance.

[0259] In some embodiments, a polypeptide domain that has a binding site with binding specificity for IL-13 competes for binding to IL-13 with a dAb selected from the group consisting of DOM10-53 (SEQ ID NO:967), DOM10-53-1 (SEQ ID NO:968), DOM10-53-2 (SEQ ID NO:969), DOM10-53-3 (SEQ ID NO:970), DOM10-53-4 (SEQ ID NO:971), DOM10-53-5 (SEQ ID NO:972), DOM10-53-6 (SEQ ID NO:973), DOM10-53-7 (SEQ ID NO:974), DOM10-53-8 (SEQ ID NO:975), DOM10-53-9 (SEQ ID NO:976), DOM10-53-10 (SEQ ID NO:977), DOM10-53-11 (SEQ ID NO:978), DOM10-53-12 (SEQ ID NO:979), DOM10-53-13 (SEQ ID NO:980), DOM10-53-14 (SEQ ID NO:981), DOM10-53-15 (SEQ ID NO:982), DOM10-53-16 (SEQ ID NO:983), DOM10-53-17 (SEQ ID NO:984), DOM10-53-18 (SEQ ID NO:985), DOM10-53-19 (SEQ ID NO:986), DOM10-53-20 (SEQ ID NO:987), DOM10-53-21 (SEQ ID NO:988), DOM10-53-122 (SEQ ID NO:989), DOM10-53-123 (SEQ ID NO:990), DOM10-53-24 (SEQ ID NO:991), DOM10-53-25 (SEQ ID NO:992), DOM10-53-26 (SEQ ID NO:993), DOM10-53-27 (SEQ ID NO:994), DOM10-53-28 (SEQ ID NO:995), DOM10-53-29 (SEQ ID NO:996), DOM10-53-30 (SEQ ID NO:997), DOM10-53-31 (SEQ ID NO:998), DOM10-53-32 (SEQ ID NO:1999), DOM10-53-43 (SEQ ID NO:1000), DOM10-53-44 (SEQ ID NO:1001), DOM10-53-45 (SEQ ID NO:1002), DOM10-53-46 (SEQ ID NO:1003), DOM10-53-47 (SEQ ID NO:1004), DOM10-53-48 (SEQ ID NO:1005), DOM10-53-49 (SEQ ID NO:1006), DOM10-53-50 (SEQ ID NO:1007), DOM10-53-51 (SEQ ID NO:1008), DOM10-53-52 (SEQ ID NO:1009), DOM10-53-53 (SEQ ID NO:1010), DOM10-53-54 (SEQ ID NO:1011), DOM10-53-55 (SEQ ID NO:1012), DOM10-53-56 (SEQ ID NO:1013), DOM10-53-57 (SEQ ID NO:1014), DOM10-53-59 (SEQ ID NO:1015), DOM10-53-60 (SEQ ID NO:1016), DOM10-53-61 (SEQ ID NO:1017), DOM10-53-62 (SEQ ID NO:1018), DOM10-53-63 (SEQ ID NO:1019), DOM10-53-64 (SEQ ID NO:1020), DOM10-53-65 (SEQ ID NO:1021), DOM10-53-66 (SEQ ID NO:1022), DOM10-53-67 (SEQ ID NO:1023), DOM10-53-68 (SEQ ID NO:1024), DOM10-53-69 (SEQ ID NO:1025), DOM10-53-70 (SEQ ID NO:1026), DOM10-53-71 (SEQ ID NO:1027), DOM10-53-72 (SEQ ID NO:1028), DOM10-53-73 (SEQ ID NO:1029), DOM10-53-74 (SEQ ID NO:1030), DOM10-53-75 (SEQ ID NO:1031), DOM10-53-76 (SEQ ID NO:1032), DOM10-53-77 (SEQ ID NO:1033), DOM10-53-78 (SEQ ID NO:1034), DOM10-53-79 (SEQ ID NO:1035), DOM10-53-80 (SEQ ID NO:1036), DOM10-53-81 (SEQ ID NO:1037), DOM10-53-82 (SEQ ID NO:1038), DOM10-53-83 (SEQ ID NO:1039), DOM10-53-84 (SEQ ID NO:1040), DOM10-53-85 (SEQ ID NO:1041), DOM10-53-86 (SEQ ID NO:1042), DOM10-53-87 (SEQ ID NO:1043), DOM10-53-88 (SEQ ID NO:1044), DOM10-53-89 (SEQ ID NO:1045), DOM10-53-91 (SEQ ID NO:1046), DOM10-53-92 (SEQ ID NO:1047), DOM10-53-93 (SEQ ID NO:1048), DOM10-53-94 (SEQ ID NO:1049), DOM10-53-95 (SEQ ID NO:1050), DOM10-53-96 (SEQ ID NO:1051), DOM10-53-97 (SEQ ID NO:1052), DOM10-53-98 (SEQ ID NO:1053), DOM10-53-99 (SEQ ID NO:1054), DOM10-53-100 (SEQ ID NO:1055), DOM10-53-103 (SEQ ID NO:1056), DOM10-53-105 (SEQ ID NO:1057), DOM10-53-106 (SEQ ID NO:1058), DOM10-53-108 (SEQ ID NO:1059), DOM10-53-110 (SEQ ID NO:1060), DOM10-53-111 (SEQ ID NO:1061), DOM10-53-112 (SEQ ID NO:10632), DOM10-53-114 (SEQ ID NO:1063), DOM10-53-115 (SEQ ID NO:1064), DOM10-53-116 (SEQ ID NO:1065), DOM10-53-117 (SEQ ID NO:1066), DOM10-53-119 (SEQ ID NO:1067), DOM10-53-120 (SEQ ID NO:1068), DOM10-53-122 (SEQ ID NO:1069), DOM10-53-201 (SEQ ID NO:1070), DOM10-53-203 (SEQ ID NO:1071), DOM10-53-204 (SEQ ID NO:1072), DOM10-53-205 (SEQ ID NO:1073), DOM10-53-206 (SEQ ID NO:1074), DOM10-53-207 (SEQ ID NO:1075), DOM10-53-208 (SEQ ID NO:1076), DOM10-53-209 (SEQ ID NO:1077), DOM10-53-210 (SEQ ID NO:1078), DOM10-53-211 (SEQ ID NO:1079), DOM10-53-213 (SEQ ID NO:1080), DOM10-53-214 (SEQ ID NO:1081), DOM10-53-215 (SEQ ID NO:1082), DOM10-53-216 (SEQ ID NO:1083), DOM10-53-217 (SEQ ID NO:1084), DOM10-53-1218 (SEQ ID NO:1085), DOM10-53-219 (SEQ ID NO:1086), DOM10-53-220 (SEQ ID NO:1087), DOM10-53-221 (SEQ ID NO:1088), DOM10-53-222 (SEQ ID NO:1089), DOM10-53-223 (SEQ ID NO:1090), DOM10-53-224 (SEQ ID NO:1091), DOM10-53-225 (SEQ ID NO:1092), DOM10-53-226 (SEQ ID NO:1093), DOM10-53-227 (SEQ ID NO:1094), DOM10-53-228 (SEQ ID NO:1095), DOM10-53-229 (SEQ ID NO:1096), DOM10-53-230 (SEQ ID NO:1097), DOM10-53-231 (SEQ ID NO:1098), DOM10-53-232 (SEQ ID NO:1099), DOM10-53-233 (SEQ ID NO:1100), DOM10-53-234 (SEQ ID NO:1101), DOM10-53-235 (SEQ ID NO:1102), DOM10-53-236 (SEQ ID NO:1103), DOM10-53-237 (SEQ ID NO:1104), DOM10-53-238 (SEQ ID NO:1105), DOM10-53-239 (SEQ ID NO:1106), DOM10-53-240 (SEQ ID NO:1107), DOM10-53-241 (SEQ ID NO:1108), DOM10-53-242 (SEQ ID NO:1109), DOM10-53-243 (SEQ ID NO:1110), DOM10-53-244 (SEQ ID NO:1111), DOM10-53-245 (SEQ ID NO:1112), DOM10-53-246 (SEQ ID NO:1113), DOM10-53-247 (SEQ ID NO:1114), DOM10-53-248 (SEQ ID NO:1115), DOM10-53-249 (SEQ ID NO:1116), DOM10-53-250 (SEQ ID NO:1117), DOM10-53-251 (SEQ ID NO:1118), DOM10-53-252 (SEQ ID NO:1119), DOM10-53-253 (SEQ ID NO:1120), DOM10-53-254 (SEQ ID NO:1121), DOM10-53-255 (SEQ ID NO:1122), DOM10-53-256 (SEQ ID NO:1123), DOM10-53-257 (SEQ ID NO:1124), DOM10-53-258 (SEQ ID NO:1125), DOM10-53-259 (SEQ ID NO:1126), DOM10-53-260 (SEQ ID NO:1127), DOM10-53-261 (SEQ ID NO:1128), DOM10-53-262 (SEQ ID NO:1129), DOM10-53-263 (SEQ ID NO:1130), DOM10-53-264 (SEQ ID NO:1131), DOM10-53-265 (SEQ ID NO:1132), DOM10-53-266 (SEQ ID NO:1133), DOM10-53-267 (SEQ ID NO:1134), DOM10-53-268 (SEQ ID NO:1135), DOM10-53-269 (SEQ ID NO:1136), DOM10-53-270 (SEQ ID NO:1137), DOM10-53-271 (SEQ ID NO:1138), DOM10-53-272 (SEQ ID NO:1139), DOM10-53-273 (SEQ ID NO:1140), DOM10-53-274 (SEQ ID NO:1141), DOM10-53-275 (SEQ ID NO:1142), DOM10-53-276 (SEQ ID NO:1143), DOM10-53-277 (SEQ ID NO:1144), DOM10-53-278 (SEQ ID NO:1145), DOM10-53-279 (SEQ ID NO:1146), DOM10-53-280 (SEQ ID NO:1147), DOM10-53-281 (SEQ ID NO:1148), DOM10-53-282 (SEQ ID NO:1149), DOM10-53-283 (SEQ ID NO:1150), DOM10-53-284 (SEQ ID NO:1151), DOM10-53-285 (SEQ ID NO:1152), DOM10-53-286 (SEQ ID NO:1153), DOM10-53-287 (SEQ ID NO:1154), DOM10-53-288 (SEQ ID NO:1155), DOM10-53-289 (SEQ ID NO:1156), DOM10-53-290 (SEQ ID NO:1157), DOM10-53-291 (SEQ ID NO:1158), DOM10-53-292 (SEQ ID NO:1159), DOM10-53-293 (SEQ ID NO:1160), DOM10-53-294 (SEQ ID NO:1161), DOM10-53-295 (SEQ ID NO:1162), DOM10-53-296 (SEQ ID NO:1163), DOM10-53-297 (SEQ ID NO:1164), DOM10-53-298 (SEQ ID NO:1165), DOM10-53-299 (SEQ ID NO:1166), DOM10-53-300 (SEQ ID NO:1167), DOM10-53-301 (SEQ ID NO:1168), DOM10-53-302 (SEQ ID NO:1169), DOM10-53-303 (SEQ ID NO:1170), DOM10-53-304 (SEQ ID NO:1171), DOM10-53-305 (SEQ ID NO:1172), DOM10-53-306 (SEQ ID NO:1173), DOM10-53-307 (SEQ ID NO:1174), DOM10-53-308 (SEQ ID NO:1175), DOM10-53-309 (SEQ ID NO:1176), DOM10-53-310 (SEQ ID NO:11787), DOM10-53-311 (SEQ ID NO:1178), DOM10-53-312 (SEQ ID NO:1179), DOM10-53-314 (SEQ ID NO:1180), DOM10-53-315 (SEQ ID NO:1181), DOM10-53-316 (SEQ ID NO:1182), DOM10-53-317 (SEQ ID NO:1183), DOM10-53-318 (SEQ ID NO:1184), DOM10-53-319 (SEQ ID NO:1185), DOM10-53-320 (SEQ ID NO:1186), DOM10-53-321 (SEQ ID NO:1187), DOM10-53-322 (SEQ ID NO:1188), DOM10-53-323 (SEQ ID NO:1189), DOM10-53-324 (SEQ ID NO:1190), DOM10-53-325 (SEQ ID NO:1191), DOM10-53-326 (SEQ ID NO:1192), DOM10-53-327 (SEQ ID NO:1193), DOM10-53-328 (SEQ ID NO:1194), DOM10-53-329 (SEQ ID NO:1195), DOM10-53-330 (SEQ ID NO:1196), DOM10-53-331 (SEQ ID NO:1197), DOM10-53-333 (SEQ ID NO:1198), DOM10-53-334 (SEQ ID NO:1199), DOM10-53-336 (SEQ ID NO:1200), DOM10-53-337 (SEQ ID NO:1201), DOM10-53-338 (SEQ ID NO:1202), DOM10-53-339 (SEQ ID NO:1203), DOM10-53-340 (SEQ ID NO:1204), DOM10-53-341 (SEQ ID NO:1205), DOM10-53-342 (SEQ ID NO:1206), DOM10-53-343 (SEQ ID NO:1207), DOM10-53-344 (SEQ ID NO:1208), DOM10-53-345 (SEQ ID NO:1209), DOM10-53-346 (SEQ ID NO:1210), DOM10-53-347 (SEQ ID NO:1211), DOM10-53-348 (SEQ ID NO:1212), DOM10-53-349 (SEQ ID NO:1213), DOM10-53-350 (SEQ ID NO:1214), DOM10-53-351 (SEQ ID NO:1215), DOM10-53-352 (SEQ ID NO:1216), DOM10-53-353 (SEQ ID NO:1217), DOM10-53-354 (SEQ ID NO:1218), DOM10-53-355 (SEQ ID NO: 1219), DOM10-53-356 (SEQ ID NO:1220), DOM10-53-357 (SEQ ID NO:1221), DOM10-53-358 (SEQ ID NO:1222), DOM10-53-359 (SEQ ID NO:1223), DOM10-53-360 (SEQ ID NO:1224), DOM10-53-361 (SEQ ID NO:1225), DOM10-53-362 (SEQ ID NO:1226), DOM10-53-363 (SEQ ID NO:1227), DOM10-53-364 (SEQ ID NO:1228), DOM10-53-365 (SEQ ID NO:1229), DOM10-53-366 (SEQ ID NO:1230), DOM10-53-367 (SEQ ID NO:1231), DOM10-53-368 (SEQ ID NO:1232), DOM10-53-369 (SEQ ID NO:1233), DOM10-53-370 (SEQ ID NO:1234), DOM10-53-371 (SEQ ID NO:1235), DOM10-53-372 (SEQ ID NO:1236), DOM10-53-373 (SEQ ID NO:1237), DOM10-53-374 (SEQ ID NO:1238), DOM10-53-375 (SEQ ID NO:1239), DOM10-53-376 (SEQ ID NO:1240), DOM10-53-377 (SEQ ID NO:1241), DOM10-53-378 (SEQ ID NO:1242), DOM10-53-379 (SEQ ID NO:1243), DOM10-53-380 (SEQ ID NO:1244), DOM10-53-381 (SEQ ID NO:1245), DOM10-53-382 (SEQ ID NO:1246), DOM10-53-383 (SEQ ID NO:1247), DOM10-53-384 (SEQ ID NO:1248), DOM10-53-385 (SEQ ID NO:1249), DOM10-53-386 (SEQ ID NO:1250), DOM10-53-387 (SEQ ID NO:1251), DOM10-53-388 (SEQ ID NO:1252), DOM10-53-389 (SEQ ID NO:1253), DOM10-53-390 (SEQ ID NO:1254), DOM10-53-391 (SEQ ID NO:1255), DOM10-53-392 (SEQ ID NO:1256), DOM10-53-393 (SEQ ID NO:1257), DOM10-53-394 (SEQ ID NO:1258), DOM10-53-395 (SEQ ID NO:1259), DOM10-53-396 (SEQ ID NO:1260), DOM10-53-400 (SEQ ID NO:1261), DOM10-53-401 (SEQ ID NO:1262), DOM10-53-402 (SEQ ID NO:1263), DOM10-53-403 (SEQ ID NO:1264), DOM10-53-404 (SEQ ID NO:1265), DOM10-53-405 (SEQ ID NO:1266), DOM10-53-406 (SEQ ID NO:1267), DOM10-53-407 (SEQ ID NO:1268), DOM10-53-408 (SEQ ID NO:1269), DOM10-53-409 (SEQ ID NO:1270), DOM10-53-410 (SEQ ID NO:1271), DOM10-53-411 (SEQ ID NO:1272), DOM10-53-412 (SEQ ID NO:1273), DOM10-53-413 (SEQ ID NO:1274), DOM10-53-414 (SEQ ID NO:1275), DOM10-53-415 (SEQ ID NO:1276), DOM10-53-416 (SEQ ID NO:1277), DOM10-53-417 (SEQ ID NO:1278), DOM10-53-418 (SEQ ID NO:1279), DOM10-53-419 (SEQ ID NO:1280), DOM10-53-420 (SEQ ID NO:1281), DOM10-53-421 (SEQ ID NO:1282), DOM10-168 (SEQ ID NO:1508), DOM10-169 (SEQ ID NO:1509), DOM10-176 (SEQ ID NO:1510), DOM10-176-1 (SEQ ID NO:1511), DOM10-176-2 (SEQ ID NO:1512), DOM10-173 (SEQ ID NO:1513), DOM10-176-4 (SEQ ID NO:1514), DOM10-176-5 (SEQ ID NO:1515), DOM10-176-6 (SEQ ID NO:1516), DOM10-176-23 (SEQ ID NO:1517), DOM10-176-24 (SEQ ID NO:1518), DOM10-176-25 (SEQ ID NO:1519), DOM10-176-26 (SEQ ID NO:1520), DOM10-176-27 (SEQ ID NO:1521), DOM10-176-28 (SEQ ID NO:1522), DOM10-176-29 (SEQ ID NO:1523), DOM10-176-30 (SEQ ID NO:1524), DOM10-176-31 (SEQ ID NO:1525), DOM10-176-32 (SEQ ID NO:1526), DOM10-176-33 (SEQ ID NO:1527), DOM10-176-34 (SEQ ID NO:1528), DOM10-176-35 (SEQ ID NO:1529), DOM10-176-36 (SEQ ID NO:1530), DOM10-176-37 (SEQ ID NO:1531), DOM10-176-38 (SEQ ID NO:1532), DOM10-176-39 (SEQ ID NO:1533), DOM10-176-40 (SEQ ID NO:1534), DOM10-176-101 (SEQ ID NO:1535), DOM10-176-102 (SEQ ID NO:1536), DOM10-176-103 (SEQ ID NO:1537), DOM10-176-104 (SEQ ID NO:1538), DOM10-176-105 (SEQ ID NO:1539), DOM10-176-106 (SEQ ID NO:1540), DOM10-176-107 (SEQ ID NO:1541), DOM10-176-108 (SEQ ID NO:1542), DOM10-176-109 (SEQ ID NO:1543), DOM10-176-110 (SEQ ID NO:1544), DOM10-176-111 (SEQ ID NO:1545), DOM10-176-112 (SEQ ID NO:1546), DOM10-176-113 (SEQ ID NO:1547), DOM10-176-114 (SEQ ID NO:1548), DOM10-176-115 (SEQ ID NO:1549), DOM10-176-116 (SEQ ID NO:1550), DOM10-176-117 (SEQ ID NO:1551), DOM10-176-500 (SEQ ID NO:1552), DOM10-176-501 (SEQ ID NO:1553), DOM10-176-502 (SEQ ID NO:1554), DOM10-176-503 (SEQ ID NO:1555), DOM10-176-504 (SEQ ID NO:1556), DOM10-176-505 (SEQ ID NO:1557), DOM10-176-506 (SEQ ID NO:1558), DOM10-176-507 (SEQ ID NO:1559), DOM10-176-508 (SEQ ID NO:1560), DOM10-176-509 (SEQ ID NO:1561), DOM10-176-510 (SEQ ID NO:1562), DOM10-176-511 (SEQ ID NO:1563), DOM10-176-512 (SEQ ID NO:1564), DOM10-176-513 (SEQ ID NO:1565), DOM10-176-514 (SEQ ID NO:1566), DOM10-176-515 (SEQ ID NO:1567), DOM10-176-516 (SEQ ID NO:1568), DOM10-176-517 (SEQ ID NO:1569), DOM10-176-518 (SEQ ID NO:1570), DOM10-176-519 (SEQ ID NO:1571), DOM10-176-520 (SEQ ID NO:1572), DOM10-176-521 (SEQ ID NO:1573), DOM10-176-522 (SEQ ID NO:1574), DOM10-176-523 (SEQ ID NO:1575), DOM10-176-524 (SEQ ID NO:1576), DOM10-176-525 (SEQ ID NO:1577), DOM10-176-526 (SEQ ID NO:1578), DOM10-176-527 (SEQ ID NO:1579), DOM10-176-528 (SEQ ID NO:1580), DOM10-176-529 (SEQ ID NO:1581), DOM10-176-530 (SEQ ID NO:1582), DOM10-176-531 (SEQ ID NO:1583), DOM10-176-532 (SEQ ID NO:1584), DOM10-176-533 (SEQ ID NO:1585), DOM10-176-534 (SEQ ID NO:1586), DOM10-176-535 (SEQ ID NO:1587), DOM10-176-536 (SEQ ID NO:1588), DOM10-176-537 (SEQ ID NO:1589), DOM10-176-538 (SEQ ID NO:1590), DOM10-176-539 (SEQ ID NO:1591), DOM10-176-540 (SEQ ID NO:1592), DOM10-176-541 (SEQ ID NO:1593), DOM10-176-542 (SEQ ID NO:1594), DOM10-176-543 (SEQ ID NO:1595), DOM10-176-544 (SEQ ID NO:1596), DOM10-176-545 (SEQ ID NO:1597), DOM10-176-546 (SEQ ID NO:1598), DOM10-176-547 (SEQ ID NO:1599), DOM10-176-548 (SEQ ID NO:1600), DOM10-176-549 (SEQ ID NO:1601), DOM10-176-550 (SEQ ID NO:1602), DOM10-176-551 (SEQ ID NO:1603), DOM10-176-552 (SEQ ID NO:1604), DOM10-176-553 (SEQ ID NO:1605), DOM10-176-554 (SEQ ID NO:1606), DOM10-176-555 (SEQ ID NO:1607), DOM10-176-556 (SEQ ID NO:1608), DOM10-176-557 (SEQ ID NO:1609), DOM10-176-558 (SEQ ID NO:1610), DOM10-176-559 (SEQ ID NO:1611), DOM10-176-560 (SEQ ID NO:1612), DOM10-176-561 (SEQ ID NO:1613), DOM10-176-562 (SEQ ID NO:1614), DOM10-176-563 (SEQ ID NO:1615), DOM10-176-564 (SEQ ID NO:1616), DOM10-176-565 (SEQ ID NO:1617), DOM10-176-566 (SEQ ID NO:1618), DOM10-176-567 (SEQ ID NO:1619), DOM10-176-568 (SEQ ID NO:1620), DOM10-176-569 (SEQ ID NO:1621), DOM10-176-570 (SEQ ID NO:1622), DOM10-176-571 (SEQ ID NO:1623), DOM10-176-572 (SEQ ID NO:1624), DOM10-176-573 (SEQ ID NO:1625), DOM10-176-574 (SEQ ID NO:1626), DOM10-176-575 (SEQ ID NO:1627), DOM10-176-576 (SEQ ID NO:1628), DOM10-176-577 (SEQ ID NO:1629), DOM10-176-578 (SEQ ID NO:1630), DOM10-176-579 (SEQ ID NO:1631), DOM10-176-580 (SEQ ID NO:1632), DOM10-176-581 (SEQ ID NO:1633), DOM10-176-582 (SEQ ID NO:1634), DOM10-176-583 (SEQ ID NO:1635), DOM10-176-584 (SEQ ID NO:1636), DOM10-176-585 (SEQ ID NO:1637), DOM10-176-586 (SEQ ID NO:1638), DOM10-176-587 (SEQ ID NO:1639), DOM10-176-588 (SEQ ID NO:1640), DOM10-176-589 (SEQ ID NO:1641), DOM10-176-590 (SEQ ID NO:1642), DOM10-176-591 (SEQ ID NO:1643), DOM10-176-592 (SEQ ID NO:1644), DOM10-176-593 (SEQ ID NO:1645), DOM10-176-594 (SEQ ID NO:1646), DOM10-176-595 (SEQ ID NO:1647), DOM10-176-596 (SEQ ID NO:1648), DOM10-176-597 (SEQ ID NO:1649), DOM10-176-598 (SEQ ID NO:1650), DOM10-176-599 (SEQ ID NO:1651), DOM110-176-600 (SEQ ID NO:1652), DOM10-176-601 (SEQ ID NO:1653), DOM10-176-602 (SEQ ID NO:1654), DOM10-176-603 (SEQ ID NO:1655), DOM10-176-604 (SEQ ID NO:1656), DOM10-176-605 (SEQ ID NO:1657), DOM10-176-606 (SEQ ID NO:1658), DOM10-176-607 (SEQ ID NO:1659), DOM10-176-608 (SEQ ID NO:1660), DOM10-176-609 (SEQ ID NO:1661), DOM10-176-610 (SEQ ID NO:1662), DOM10-176-611 (SEQ ID NO:1663), DOM10-176-612 (SEQ ID NO:1664), DOM10-176-613 (SEQ ID NO:1665), DOM10-176-614 (SEQ ID NO:1666), DOM10-176-615 (SEQ ID NO:1667), DOM10-176-616 (SEQ ID NO:1668), DOM10-176-617 (SEQ ID NO:1669), DOM10-176-618 (SEQ ID NO:1670), DOM10-176-619 (SEQ ID NO:1671), DOM10-176-620 (SEQ ID NO:1672), DOM10-176-621 (SEQ ID NO:1673), DOM10-176-622 (SEQ ID NO:1674), DOM10-176-623 (SEQ ID NO:1675), DOM10-176-624 (SEQ ID NO:1676), DOM10-176-625 (SEQ ID NO:1677), DOM10-176-626 (SEQ ID NO:1678), DOM10-176-627 (SEQ ID NO:1679), DOM10-176-628 (SEQ ID NO:1680), DOM10-176-629 (SEQ ID NO:1681), DOM10-176-630 (SEQ ID NO:1682), DOM10-176-631 (SEQ ID NO:1683), DOM10-176-632 (SEQ ID NO:1684), DOM10-176-633 (SEQ ID NO:1685), DOM10-176-634 (SEQ ID NO:1686), DOM10-176-635 (SEQ ID NO:1687), DOM10-176-636 (SEQ ID NO:1688), DOM10-176-637 (SEQ ID NO:1689), DOM10-176-638 (SEQ ID NO:1690), DOM10-176-639 (SEQ ID NO:1691), DOM10-176-640 (SEQ ID NO:1692), DOM10-176-641 (SEQ ID NO:1693), DOM10-176-643 (SEQ ID NO:1694), DOM10-176-644 (SEQ ID NO:1695), DOM10-176-645 (SEQ ID NO:1696), DOM10-176-646 (SEQ ID NO:1697), DOM10-176-647 (SEQ ID NO:1698), DOM10-176-648 (SEQ ID NO:1699), DOM10-176-649 (SEQ ID NO:1700), DOM10-176-650 (SEQ ID NO:1701), DOM10-176-651 (SEQ ID NO:1702), DOM10-176-652 (SEQ ID NO:1703), DOM10-176-653 (SEQ ID NO:1704), DOM10-176-654 (SEQ ID NO:1705), DOM10-176-655 (SEQ ID NO:1706), DOM10-176-656 (SEQ ID NO:1707), DOM10-176-657 (SEQ ID NO:1708), DOM10-176-658 (SEQ ID NO:1709), DOM10-176-659 (SEQ ID NO:1710), DOM10-176-660 (SEQ ID NO:1711), DOM10-176-661 (SEQ ID NO:1712), DOM10-176-662 (SEQ ID NO:1713), DOM10-176-663 (SEQ ID NO:1714), DOM10-176-664 (SEQ ID NO:1715), DOM10-176-665 (SEQ ID NO:1716), DOM10-176-666 (SEQ ID NO:1717), DOM10-176-667 (SEQ ID NO:1718), DOM10-176-668 (SEQ ID NO:1719), DOM10-176-669 (SEQ ID NO:1720), DOM10-176-670 (SEQ ID NO:1721), DOM10-176-671 (SEQ ID NO:1722), DOM10-176-672 (SEQ ID NO:1723), DOM10-176-673 (SEQ ID NO:1724), DOM10-176-674 (SEQ ID NO:1725), DOM10-176-675 (SEQ ID NO:1726), DOM10-253 (SEQ ID NO:1727), DOM10-255 (SEQ ID NO:1728), DOM10-272 (SEQ ID NO:1729), DOM10-307 (SEQ ID NO:1730), DOM10-319 (SEQ ID NO:1731) and DOM10-319-1 (SEQ ID NO:1732).

[0260] In some embodiments, a polypeptide domain that has a binding site with binding specificity for IL-13 competes for binding to IL-13 with a dAb selected from the group consisting of DOM10-236 (SEQ ID NO:2129), DOM10-238 (SEQ ID NO:2130), DOM10-241 (SEQ ID NO:2131), DOM10-245 (SEQ ID NO:2132), DOM10-249 (SEQ ID NO:2133), DOM10-250 (SEQ ID NO:2134), DOM10-251 (SEQ ID NO:2135), DOM10-254 (SEQ ID NO:2136), DOM10-256 (SEQ ID NO:2137), DOM10-259 (SEQ ID NO:2138), DOM10-260 (SEQ ID NO:2139), DOM10-261 (SEQ ID NO:2140), DOM10-263 (SEQ ID NO:2141), DOM10-264 (SEQ ID NO:2142), DOM10-273 (SEQ ID NO:2143), DOM10-278 (SEQ ID NO:2144), DOM10-279 (SEQ ID NO:2145), DOM10-281 (SEQ ID NO:2146), DOM10-282 (SEQ ID NO:2147), DOM10-283 (SEQ ID NO:2148), DOM10-400 (SEQ ID NO:2149), DOM10-401 (SEQ ID NO:2150), DOM10-402 (SEQ ID NO:2151), DOM10-404 (SEQ ID NO:2152), DOM10-406 (SEQ ID NO:2153), DOM10-407 (SEQ ID NO:2154), DOM10-409 (SEQ ID NO:2155), DOM10-410 (SEQ ID NO:2156), DOM10-414 (SEQ ID NO:2157), DOM10-415 (SEQ ID NO:2158), DOM10-416 (SEQ ID NO:2159), DOM10-418 (SEQ ID NO:2160), DOM10-420 (SEQ ID NO:2161), DOM10-422 (SEQ ID NO:2162), DOM10-423 (SEQ ID NO:2163), DOM10-424 (SEQ ID NO:2164), DOM10-425 (SEQ ID NO:2165), DOM10-426 (SEQ ID NO:2166), DOM10-427 (SEQ ID NO:2167), DOM10-428 (SEQ ID NO:2168), DOM10-429 (SEQ ID NO:2169), DOM10-430 (SEQ ID NO:2170), DOM10-431 (SEQ ID NO:2171), DOM10-432 (SEQ ID NO:2172), DOM10-433 (SEQ ID NO:2173), DOM10-467 (SEQ ID NO:2174), DOM10-468 (SEQ ID NO:2175), DOM10-469 (SEQ ID NO:2176), DOM10-470 (SEQ ID NO:2177), DOM10-234 (SEQ ID NO:2178), DOM10-235 (SEQ ID NO:2179), DOM10-237 (SEQ ID NO:2180), DOM10-239 (SEQ ID NO:2181), DOM10-240 (SEQ ID NO:2182), DOM10-242 (SEQ ID NO:2183), DOM10-243 (SEQ ID NO:2184), DOM10-244 (SEQ ID NO:2185), DOM10-246 (SEQ ID NO:2186), DOM10-247 (SEQ ID NO:2187), DOM10-248 (SEQ ID NO:2188), DOM10-252 (SEQ ID NO:2189), DOM10-257 (SEQ ID NO:2190), DOM10-258 (SEQ ID NO:2191), DOM10-266 (SEQ ID NO:2194), DOM10-274 (SEQ ID NO:2193), DOM10-266 (SEQ ID NO:2194), DOM10-274 (SEQ ID NO:2195), DOM10-275 (SEQ ID NO:2196), DOM10-276 (SEQ ID NO:2197), DOM10-277 (SEQ ID NO:2198), DOM10-280 (SEQ ID NO:2199), DOM10-403 (SEQ ID NO:2200), DOM10-405 (SEQ ID NO:2201), DOM10-408 (SEQ ID NO:2202), DOM10-411 (SEQ ID NO:2203), DOM10-412 (SEQ ID NO:2204), DOM10-413 (SEQ ID NO:2205), DOM10-417 (SEQ ID NO:2206), DOM10-419 (SEQ ID NO:2207), DOM10-472 (SEQ ID NO:2208), DOM10-203 (SEQ ID NO:2209), DOM10-205 (SEQ ID NO:2210), DOM10-208 (SEQ ID NO:2211), DOM10-218 (SEQ ID NO:2212), DOM10-219 (SEQ ID NO:2213), DOM10-220 (SEQ ID NO:2214), DOM10-2255 (SEQ ID NO:2215), DOM10-228 (SEQ ID NO:2216), DOM10-229 (SEQ ID NO:2217), DOM10-230 (SEQ ID NO:2218), DOM10-231 (SEQ ID NO:2219), DOM10-268 (SEQ ID NO:2220), DOM10-201 (SEQ ID NO:2221), DOM10-202 (SEQ ID NO:2222), DOM10-204 (SEQ ID NO:2223), DOM10-206 (SEQ ID NO:2224), DOM10-207 (SEQ ID NO:2225), DOM10-209 (SEQ ID NO:2226), DOM10-210 (SEQ ID NO:2227), DOM10-211 (SEQ ID NO:2228), DOM10-213 (SEQ ID NO:2229), DOM10-214 (SEQ ID NO:2230), DOM10-215 (SEQ ID NO:2231), DOM10-216 (SEQ ID NO:2232), DOM10-217 (SEQ ID NO:2233), DOM10-221 (SEQ ID NO:2234), DOM10-223 (SEQ ID NO:2235), DOM10-224 (SEQ ID NO:2236), DOM10-227 (SEQ ID NO:2237), DOM10-232 (SEQ ID NO:2238), DOM10-267 (SEQ ID NO:2239), DOM10-270 (SEQ ID NO:2240), DOM10-275-1 (SEQ ID NO:2241), DOM10-276-2 (SEQ ID NO:2242), DOM10-276-3 (SEQ ID NO:2243), DOM10-275-3 (SEQ ID NO:2244), DOM10-277-2 (SEQ ID NO:2245), DOM10-277-3 (SEQ ID NO:2246), DOM10-273-1 (SEQ ID NO:2247), DOM10-273-2 (SEQ ID NO:2248), DOM10-275-2 (SEQ ID NO:2249), DOM10-275-4 (SEQ ID NO:2250), DOM10-276-1 (SEQ ID NO:2251), DOM10-276-4 (SEQ ID NO:2252), DOM10-277-1 (SEQ ID NO:2253), DOM10-275-13 (SEQ ID NO:2254), DOM10-275-15 (SEQ ID NO:2255), DOM10-275-20 (SEQ ID NO:2256), DOM10-275-8 (SEQ ID NO:2257), DOM10-276-13 (SEQ ID NO:2258), DOM10-276-14 (SEQ ID NO:2259), DOM10-276-15 (SEQ ID NO:2260), DOM10-276-17 (SEQ ID NO:2261), DOM10-276-7 (SEQ ID NO:2262), DOM10-276-8 (SEQ ID NO:2263), DOM10-275-11 (SEQ ID NO:2264), DOM10-275-12 (SEQ ID NO:2265), DOM10-275-14 (SEQ ID NO:2266), DOM10-275-16 (SEQ ID NO:2267), DOM10-275-17 (SEQ ID NO:2268), DOM10-275-5 (SEQ ID NO:2269), DOM10-275-6 (SEQ ID NO:2270), DOM10-275-7 (SEQ ID NO:2271), DOM10-275-9 (SEQ ID NO:2272), DOM10-276-10 (SEQ ID NO:2273), DOM10-276-11 (SEQ ID NO:2274), DOM10-276-12 (SEQ ID NO:2275), DOM10-276-16 (SEQ ID NO:2276), DOM10-276-5 (SEQ ID NO:2277), DOM10-276-6 (SEQ ID NO:2278), DOM10-276-9 (SEQ ID NO:2279), DOM10-212 (SEQ ID NO:2280), DOM10-53-424 (SEQ ID NO:2281), DOM10-53-425 (SEQ ID NO:2282), DOM10-53-426 (SEQ ID NO:2283), DOM10-53-422 (SEQ ID NO:2284), DOM10-53-423 (SEQ ID NO:2285), DOM10-53-613 (SEQ ID NO:2286), DOM10-53-517 (SEQ ID NO:2287), DOM10-53-519 (SEQ ID NO:2288), DOM10-53-520 (SEQ ID NO:2289), DOM10-53-521 (SEQ ID NO:2290), DOM10-53-522 (SEQ ID NO:2291), DOM10-53-526 (SEQ ID NO:2292), DOM10-53-527 (SEQ ID NO:2293), DOM10-53-528 (SEQ ID NO:2294), DOM10-53-518 (SEQ ID NO:2295), DOM10-53-523 (SEQ ID NO:2296), DOM10-53-524 (SEQ ID NO:2297), DOM10-53-525 (SEQ ID NO:2298), DOM10-53-601 (SEQ ID NO:2299), DOM10-53-602 (SEQ ID NO:2300), DOM10-53-605 (SEQ ID NO:2301), DOM10-53-606 (SEQ ID NO:2302), DOM10-53-607 (SEQ ID NO:2303), DOM10-53-608 (SEQ ID NO:2304), DOM10-53-609 (SEQ ID NO:2305), DOM10-53-610 (SEQ ID NO:2306), DOM10-53-611 (SEQ ID NO:2307), DOM10-53-612 (SEQ ID NO:2308), DOM10-53-603 (SEQ ID NO:2309), DOM10-53-604 (SEQ ID NO:2310), DOM10-53-429 (SEQ ID NO:2311), DOM10-53-432 (SEQ ID NO:2312), DOM10-53-433 (SEQ ID NO:2313), DOM10-53-435 (SEQ ID NO:2314), DOM10-53-430 (SEQ ID NO:2315), DOM10-53-431 (SEQ ID NO:2316), DOM10-53-434 (SEQ ID NO:2317), DOM10-53-436 (SEQ ID NO:2318), DOM10-53-437 (SEQ ID NO:2319), DOM10-53-438 (SEQ ID NO:2320), DOM10-53-440 (SEQ ID NO:2321), DOM10-53-439 (SEQ ID NO:2322), DOM10-53-441 (SEQ ID NO:2323), DOM10-53-442 (SEQ ID NO:2324), DOM10-53-443 (SEQ ID NO:2325), DOM10-53-444 (SEQ ID NO:2326), DOM10-53-445 (SEQ ID NO:2327), DOM10-53-446 (SEQ ID NO:2328), DOM10-53-447 (SEQ ID NO:2329), DOM10-53-449 (SEQ ID NO:2330), DOM10-53-448 (SEQ ID NO:2331), DOM10-53-450 (SEQ ID NO:2332), DOM10-53-451 (SEQ ID NO:2333), DOM10-53-452 (SEQ ID NO:2334), DOM10-53-453 (SEQ ID NO:2335), DOM10-53-454 (SEQ ID NO:2336), DOM10-53-455 (SEQ ID NO:2337), DOM10-53-456 (SEQ ID NO:2338), DOM10-53-457 (SEQ ID NO:2339), DOM10-53-458 (SEQ ID NO:2340), DOM10-53-459 (SEQ ID NO:2341), DOM10-53-461 (SEQ ID NO:2342), DOM10-53-462 (SEQ ID NO:2343), DOM10-53-465 (SEQ ID NO:2344), DOM10-53-466 (SEQ ID NO:2345), DOM10-53-467 (SEQ ID NO:2346), DOM10-53-468 (SEQ ID NO:2347), DOM10-53-460 (SEQ ID NO:2348), DOM10-53-463 (SEQ ID NO:2349), DOM10-53-464 (SEQ ID NO:2350), DOM10-53-469 (SEQ ID NO:2351), DOM10-53-471 (SEQ ID NO:2352), DOM10-53-470 (SEQ ID NO:2353), DOM10-53-533 (SEQ ID NO:2354), DOM10-53-534 (SEQ ID NO:2355), DOM10-53-535 (SEQ ID NO:2356), DOM10-53-537 (SEQ ID NO:2357), DOM10-53-538 (SEQ ID NO:2358), DOM10-53-539 (SEQ ID NO:2359), DOM10-53-540 (SEQ ID NO:2360), DOM10-53-531 (SEQ ID NO:2361), DOM10-53-532 (SEQ ID NO:2362), DOM10-53-536 (SEQ ID NO:2363), DOM10-53-542 (SEQ ID NO:2364), DOM10-53-541 (SEQ ID NO:2365), DOM10-53-473 (SEQ ID NO:2366), DOM10-53-472 (SEQ ID NO:2367), DOM10-53-475 (SEQ ID NO:2368), DOM10-53-474 (SEQ ID NO:2369), DOM10-53-543 (SEQ ID NO:2370), DOM10-53-544 (SEQ ID NO: 2371), DOM10-53-545 (SEQ ID NO:2372), DOM10-53-548 (SEQ ID NO:2373), DOM10-53-546 (SEQ ID NO:2374), DOM10-53-549 (SEQ ID NO:2375), DOM10-53-547 (SEQ ID NO:2376), DOM10-53-550 (SEQ ID NO:2377), DOM10-53-551 (SEQ ID NO:2378), DOM10-53-560 (SEQ ID NO:2379), DOM10-53-565 (SEQ ID NO:2380), DOM10-53-559 (SEQ ID NO:2381), DOM10-53-561 (SEQ ID NO:2382), DOM10-53-562 (SEQ ID NO:2383), DOM10-53-563 (SEQ ID NO:2384), DOM10-53-564 (SEQ ID NO:2385), DOM10-53-566 (SEQ ID NO:2386), DOM10-53-554 (SEQ ID NO:2387), DOM10-53-552 (SEQ ID NO:2388), DOM10-53-553 (SEQ ID NO:2389), DOM10-53-558 (SEQ ID NO:2390), DOM10-53-556 (SEQ ID NO:2391) and DOM10-53-557 (SEQ ID NO:2392).

[0261] In some embodiments, the polypeptide domain that has a binding site with binding specificity for IL-13 (e.g., a dAb) comprises an amino acid sequence that has at least about 80%, at least about 85%, at least about 90%, at least about 91%, at least about 92%, at least about 93%, at least about 94%, at least about 95%, at least about 96%, at least about 97%, at least about 98%, or at least about 99% amino acid sequence identity with the amino acid sequence or a dAb selected from the group consisting of DOM10-53 (SEQ ID NO:967), DOM10-53-1 (SEQ ID NO:968), DOM10-53-2 (SEQ ID NO:969), DOM10-53-3 (SEQ ID NO:970), DOM10-53-4 (SEQ ID NO:971), DOM10-53-5 (SEQ ID NO:972), DOM10-53-6 (SEQ ID NO:973), DOM10-53-7 (SEQ ID NO:974), DOM10-53-8 (SEQ ID NO:975), DOM10-53-9 (SEQ ID NO:976), DOM10-53-10 (SEQ ID NO:977), DOM10-53-11 (SEQ ID NO:978), DOM10-53-12 (SEQ ID NO:979), DOM10-53-13 (SEQ ID NO:980), DOM10-53-14 (SEQ ID NO:981), DOM10-53-15 (SEQ ID NO:982), DOM10-53-16 (SEQ ID NO:983), DOM10-53-17 (SEQ ID NO:984), DOM10-53-18 (SEQ ID NO:985), DOM10-53-19 (SEQ ID NO:986), DOM10-53-20 (SEQ ID NO:987), DOM10-53-21 (SEQ ID NO:988), DOM10-53-122 (SEQ ID NO:989), DOM10-53-123 (SEQ ID NO:990), DOM10-53-24 (SEQ ID NO:991), DOM10-53-25 (SEQ ID NO:992), DOM10-53-26 (SEQ ID NO:993), DOM10-53-27 (SEQ ID NO:994), DOM10-53-28 (SEQ ID NO:995), DOM10-53-29 (SEQ ID NO:996), DOM10-53-30 (SEQ ID NO:997), DOM10-53-31 (SEQ ID NO:998), DOM10-53-32 (SEQ ID NO:1999), DOM10-53-43 (SEQ ID NO:1000), DOM10-53-44 (SEQ ID NO:1001), DOM10-53-45 (SEQ ID NO:1002), DOM10-53-46 (SEQ ID NO:1003), DOM10-53-47 (SEQ ID NO:1004), DOM10-53-48 (SEQ ID NO:1005), DOM10-53-49 (SEQ ID NO:1006), DOM10-53-50 (SEQ ID NO:1007), DOM10-53-51 (SEQ ID NO:1008), DOM10-53-52 (SEQ ID NO:1009), DOM10-53-53 (SEQ ID NO:1010), DOM10-53-54 (SEQ ID NO:1011), DOM10-53-55 (SEQ ID NO:1012), DOM10-53-56 (SEQ ID NO:1013), DOM10-53-57 (SEQ ID NO:1014), DOM10-53-59 (SEQ ID NO:1015), DOM10-53-60 (SEQ ID NO:1016), DOM10-53-61 (SEQ ID NO:1017), DOM10-53-62 (SEQ ID NO:1018), DOM10-53-63 (SEQ ID NO:1019), DOM10-53-64 (SEQ ID NO:1020), DOM10-53-65 (SEQ ID NO:1021), DOM10-53-66 (SEQ ID NO:1022), DOM10-53-67 (SEQ ID NO:1023), DOM10-53-68 (SEQ ID NO:1024), DOM10-53-69 (SEQ ID NO:1025), DOM10-53-70 (SEQ ID NO:1026), DOM10-53-71 (SEQ ID NO:1027), DOM10-53-72 (SEQ ID NO:1028), DOM10-53-73 (SEQ ID NO:1029), DOM10-53-74 (SEQ ID NO:1030), DOM10-53-75 (SEQ ID NO:1031), DOM10-53-76 (SEQ ID NO:1032), DOM10-53-77 (SEQ ID NO:1033), DOM10-53-78 (SEQ ID NO:1034), DOM10-53-79 (SEQ ID NO:1035), DOM10-53-80 (SEQ ID NO:1036), DOM10-53-81 (SEQ ID NO:1037), DOM10-53-82 (SEQ ID NO:1038), DOM10-53-83 (SEQ ID NO:1039), DOM10-53-84 (SEQ ID NO:1040), DOM10-53-85 (SEQ ID NO:1041), DOM10-53-86 (SEQ ID NO:1042), DOM10-53-87 (SEQ ID NO:1043), DOM10-53-88 (SEQ ID NO:1044), DOM10-53-89 (SEQ ID NO:1045), DOM10-53-91 (SEQ ID NO:1046), DOM10-53-92 (SEQ ID NO:1047), DOM10-53-93 (SEQ ID NO:1048), DOM10-53-94 (SEQ ID NO:1049), DOM10-53-95 (SEQ ID NO:1050), DOM10-53-96 (SEQ ID NO:1051), DOM10-53-97 (SEQ ID NO:1052), DOM10-53-98 (SEQ ID NO:1053), DOM10-53-99 (SEQ ID NO:1054), DOM10-53-100 (SEQ ID NO:1055), DOM10-53-103 (SEQ ID NO:1056), DOM10-53-105 (SEQ ID NO:1057), DOM10-53-106 (SEQ ID NO:1058), DOM10-53-108 (SEQ ID NO:1059), DOM10-53-110 (SEQ ID NO:1060), DOM10-53-111 (SEQ ID NO:1061), DOM10-53-112 (SEQ ID NO:10632), DOM10-53-114 (SEQ ID NO:1063), DOM10-53-115 (SEQ ID NO:1064), DOM10-53-116 (SEQ ID NO:1065), DOM10-53-117 (SEQ ID NO:1066), DOM10-53-119 (SEQ ID NO:1067), DOM10-53-120 (SEQ ID NO:1068), DOM10-53-122 (SEQ ID NO:1069), DOM10-53-201 (SEQ ID NO:1070), DOM10-53-203 (SEQ ID NO:1071), DOM10-53-204 (SEQ ID NO:1072), DOM10-53-205 (SEQ ID NO:1073), DOM10-53-206 (SEQ ID NO:1074), DOM10-53-207 (SEQ ID NO:1075), DOM10-53-208 (SEQ ID NO:1076), DOM10-53-209 (SEQ ID NO:1077), DOM10-53-210 (SEQ ID NO:1078), DOM10-53-211 (SEQ ID NO:1079), DOM10-53-213 (SEQ ID NO:1080), DOM10-53-214 (SEQ ID NO:1081), DOM10-53-215 (SEQ ID NO:1082), DOM10-53-216 (SEQ ID NO:1083), DOM10-53-217 (SEQ ID NO:1084), DOM10-53-1218 (SEQ ID NO:1085), DOM10-53-219 (SEQ ID NO:1086), DOM10-53-220 (SEQ ID NO:1087), DOM10-53-221 (SEQ ID NO:1088), DOM10-53-222 (SEQ ID NO:1089), DOM10-53-223 (SEQ ID NO:1090), DOM10-53-224 (SEQ ID NO:1091), DOM10-53-225 (SEQ ID NO:1092), DOM10-53-226 (SEQ ID NO:1093), DOM10-53-227 (SEQ ID NO:1094), DOM10-53-228 (SEQ ID NO:1095), DOM10-53-229 (SEQ ID NO:1096), DOM10-53-230 (SEQ ID NO:1097), DOM10-53-231 (SEQ ID NO:1098), DOM10-53-232 (SEQ ID NO:1099), DOM10-53-233 (SEQ ID NO:1100), DOM10-53-234 (SEQ ID NO:1101), DOM10-53-235 (SEQ ID NO:1102), DOM10-53-236 (SEQ ID NO:1103), DOM10-53-237 (SEQ ID NO:1104), DOM10-53-238 (SEQ ID NO:1105), DOM10-53-239 (SEQ ID NO:1106), DOM10-53-240 (SEQ ID NO:1107), DOM10-53-241 (SEQ ID NO:1108), DOM10-53-242 (SEQ ID NO:1109), DOM10-53-243 (SEQ ID NO:1110), DOM10-53-244 (SEQ ID NO:1111), DOM10-53-245 (SEQ ID NO:1112), DOM10-53-246 (SEQ ID NO:1113), DOM10-53-247 (SEQ ID NO:1114), DOM10-53-248 (SEQ ID NO:1115), DOM10-53-249 (SEQ ID NO:1116), DOM10-53-250 (SEQ ID NO:1117), DOM10-53-251 (SEQ ID NO:1118), DOM10-53-252 (SEQ ID NO:1119), DOM10-53-253 (SEQ ID NO:1120), DOM10-53-254 (SEQ ID NO:1121), DOM10-53-255 (SEQ ID NO:1122), DOM10-53-256 (SEQ ID NO:1123), DOM10-53-257 (SEQ ID NO:1124), DOM10-53-258 (SEQ ID NO:1125), DOM10-53-259 (SEQ ID NO:1126), DOM10-53-260 (SEQ ID NO:1127), DOM10-53-261 (SEQ ID NO:1128), DOM10-53-262 (SEQ ID NO:1129), DOM10-53-263 (SEQ ID NO:1130), DOM10-53-264 (SEQ ID NO:1131), DOM10-53-265 (SEQ ID NO:1132), DOM10-53-266 (SEQ ID NO:1133), DOM10-53-267 (SEQ ID NO:1134), DOM10-53-268 (SEQ ID NO:1135), DOM10-53-269 (SEQ ID NO:1136), DOM10-53-270 (SEQ ID NO:1137), DOM10-53-271 (SEQ ID NO:1138), DOM10-53-272 (SEQ ID NO:1139), DOM10-53-273 (SEQ ID NO:1140), DOM10-53-274 (SEQ ID NO:1141), DOM10-53-275 (SEQ ID NO:1142), DOM10-53-276 (SEQ ID NO:1143), DOM10-53-277 (SEQ ID NO:1144), DOM10-53-278 (SEQ ID NO:1145), DOM10-53-279 (SEQ ID NO:1146), DOM10-53-280 (SEQ ID NO:1147), DOM10-53-281 (SEQ ID NO:1148), DOM10-53-282 (SEQ ID NO:1149), DOM10-53-283 (SEQ ID NO:1150), DOM10-53-284 (SEQ ID NO:1151), DOM10-53-285 (SEQ ID NO:1152), DOM10-53-286 (SEQ ID NO:1153), DOM10-53-287 (SEQ ID NO:1154), DOM10-53-288 (SEQ ID NO:1155), DOM10-53-289 (SEQ ID NO:1156), DOM10-53-290 (SEQ ID NO:1157), DOM10-53-291 (SEQ ID NO:1158), DOM10-53-292 (SEQ ID NO:1159), DOM10-53-293 (SEQ ID NO:1160), DOM10-53-294 (SEQ ID NO:1161), DOM10-53-295 (SEQ ID NO:1162), DOM10-53-296 (SEQ ID NO:1163), DOM10-53-297 (SEQ ID NO:1164), DOM10-53-298 (SEQ ID NO:1165), DOM10-53-299 (SEQ ID NO:1166), DOM10-53-300 (SEQ ID NO:1167), DOM10-53-301 (SEQ ID NO:1168), DOM10-53-302 (SEQ ID NO:1169), DOM10-53-303 (SEQ ID NO:1170), DOM10-53-304 (SEQ ID NO:1171), DOM10-53-305 (SEQ ID NO:1172), DOM10-53-306 (SEQ ID NO:1173), DOM10-53-307 (SEQ ID NO:1174), DOM10-53-308 (SEQ ID NO:1175), DOM10-53-309 (SEQ ID NO:1176), DOM10-53-310 (SEQ ID NO:11787), DOM10-53-311 (SEQ ID NO:1178), DOM10-53-312 (SEQ ID NO:1179), DOM10-53-314 (SEQ ID NO:1180), DOM10-53-315 (SEQ ID NO:1181), DOM10-53-316 (SEQ ID NO:1182), DOM10-53-317 (SEQ ID NO:1183), DOM10-53-318 (SEQ ID NO:1184), DOM10-53-319 (SEQ ID NO:1185), DOM10-53-320 (SEQ ID NO:1186), DOM10-53-321 (SEQ ID NO:1187), DOM10-53-322 (SEQ ID NO:1188), DOM10-53-323 (SEQ ID NO:1189), DOM10-53-324 (SEQ ID NO:1190), DOM10-53-325 (SEQ ID NO:1191), DOM10-53-326 (SEQ ID NO:1192), DOM10-53-327 (SEQ ID NO:1193), DOM10-53-328 (SEQ ID NO:1194), DOM10-53-329 (SEQ ID NO:1195), DOM10-53-330 (SEQ ID NO:1196), DOM10-53-331 (SEQ ID NO:1197), DOM10-53-333 (SEQ ID NO:1198), DOM10-53-334 (SEQ ID NO:1199), DOM10-53-336 (SEQ ID NO:1200), DOM10-53-337 (SEQ ID NO:1201), DOM10-53-338 (SEQ ID NO:1202), DOM10-53-339 (SEQ ID NO:1203), DOM10-53-340 (SEQ ID NO:1204), DOM10-53-341 (SEQ ID NO:1205), DOM10-53-342 (SEQ ID NO:1206), DOM10-53-343 (SEQ ID NO:1207), DOM10-53-344 (SEQ ID NO:1208), DOM10-53-345 (SEQ ID NO:1209), DOM10-53-346 (SEQ ID NO:1210), DOM10-53-347 (SEQ ID NO:1211), DOM10-53-348 (SEQ ID NO:1212), DOM10-53-349 (SEQ ID NO:1213), DOM10-53-350 (SEQ ID NO:1214), DOM10-53-351 (SEQ ID NO:1215), DOM10-53-352 (SEQ ID NO:1216), DOM10-53-353 (SEQ ID NO:1217), DOM10-53-354 (SEQ ID NO:1218), DOM10-53-355 (SEQ ID NO: 1219), DOM10-53-356 (SEQ ID NO:1220), DOM10-53-357 (SEQ ID NO:1221), DOM10-53-358 (SEQ ID NO:1222), DOM10-53-359 (SEQ ID NO:1223), DOM10-53-360 (SEQ ID NO:1224), DOM10-53-361 (SEQ ID NO:1225), DOM10-53-362 (SEQ ID NO:1226), DOM10-53-363 (SEQ ID NO:1227), DOM10-53-364 (SEQ ID NO:1228), DOM10-53-365 (SEQ ID NO:1229), DOM10-53-366 (SEQ ID NO:1230), DOM10-53-367 (SEQ ID NO:1231), DOM10-53-368 (SEQ ID NO:1232), DOM10-53-369 (SEQ ID NO:1233), DOM10-53-370 (SEQ ID NO:1234), DOM10-53-371 (SEQ ID NO:1235), DOM10-53-372 (SEQ ID NO:1236), DOM10-53-373 (SEQ ID NO:1237), DOM10-53-374 (SEQ ID NO:1238), DOM10-53-375 (SEQ ID NO:1239), DOM10-53-376 (SEQ ID NO:1240), DOM10-53-377 (SEQ ID NO:1241), DOM10-53-378 (SEQ ID NO:1242), DOM10-53-379 (SEQ ID NO:1243), DOM10-53-380 (SEQ ID NO:1244), DOM10-53-381 (SEQ ID NO:1245), DOM10-53-382 (SEQ ID NO:1246), DOM10-53-383 (SEQ ID NO:1247), DOM10-53-384 (SEQ ID NO:1248), DOM10-53-385 (SEQ ID NO:1249), DOM10-53-386 (SEQ ID NO:1250), DOM10-53-387 (SEQ ID NO:1251), DOM10-53-388 (SEQ ID NO:1252), DOM10-53-389 (SEQ ID NO:1253), DOM10-53-390 (SEQ ID NO:1254), DOM10-53-391 (SEQ ID NO:1255), DOM10-53-392 (SEQ ID NO:1256), DOM10-53-393 (SEQ ID NO:1257), DOM10-53-394 (SEQ ID NO:1258), DOM10-53-395 (SEQ ID NO:1259), DOM10-53-396 (SEQ ID NO:1260), DOM10-53-400 (SEQ ID NO:1261), DOM10-53-401 (SEQ ID NO:1262), DOM10-53-402 (SEQ ID NO:1263), DOM10-53-403 (SEQ ID NO:1264), DOM10-53-404 (SEQ ID NO:1265), DOM10-53-405 (SEQ ID NO:1266), DOM10-53-406 (SEQ ID NO:1267), DOM10-53-407 (SEQ ID NO:1268), DOM10-53-408 (SEQ ID NO:1269), DOM10-53-409 (SEQ ID NO:1270), DOM10-53-410 (SEQ ID NO:1271), DOM10-53-411 (SEQ ID NO:1272), DOM10-53-412 (SEQ ID NO:1273), DOM10-53-413 (SEQ ID NO:1274), DOM10-53-414 (SEQ ID NO:1275), DOM10-53-415 (SEQ ID NO:1276), DOM10-53-416 (SEQ ID NO:1277), DOM10-53-417 (SEQ ID NO:1278), DOM10-53-418 (SEQ ID NO:1279), DOM10-53-419 (SEQ ID NO:1280), DOM10-53-420 (SEQ ID NO:1281), DOM10-53-421 (SEQ ID NO:1282), DOM10-168 (SEQ ID NO:1508), DOM10-169 (SEQ ID NO:1509), DOM10-176 (SEQ ID NO:1510), DOM10-176-1 (SEQ ID NO:1511), DOM10-176-2 (SEQ ID NO:1512), DOM10-173 (SEQ ID NO:1513), DOM10-176-4 (SEQ ID NO:1514), DOM10-176-5 (SEQ ID NO:1515), DOM10-176-6 (SEQ ID NO:1516), DOM10-176-23 (SEQ ID NO:1517), DOM10-176-24 (SEQ ID NO:1518), DOM10-176-25 (SEQ ID NO:1519), DOM10-176-26 (SEQ ID NO:1520), DOM10-176-27 (SEQ ID NO:1521), DOM10-176-28 (SEQ ID NO:1522), DOM10-176-29 (SEQ ID NO:1523), DOM10-176-30 (SEQ ID NO:1524), DOM10-176-31 (SEQ ID NO:1525), DOM10-176-32 (SEQ ID NO:1526), DOM10-176-33 (SEQ ID NO:1527), DOM10-176-34 (SEQ ID NO:1528), DOM10-176-35 (SEQ ID NO:1529), DOM10-176-36 (SEQ ID NO:1530), DOM10-176-37 (SEQ ID NO:1531), DOM10-176-38 (SEQ ID NO:1532), DOM10-176-39 (SEQ ID NO:1533), DOM10-176-40 (SEQ ID NO:1534), DOM10-176-101 (SEQ ID NO:1535), DOM10-176-102 (SEQ ID NO:1536), DOM10-176-103 (SEQ ID NO:1537), DOM10-176-104 (SEQ ID NO:1538), DOM10-176-105 (SEQ ID NO:1539), DOM10-176-106 (SEQ ID NO:1540), DOM10-176-107 (SEQ ID NO:1541), DOM10-176-108 (SEQ ID NO:1542), DOM10-176-109 (SEQ ID NO:1543), DOM10-176-110 (SEQ ID NO:1544), DOM10-176-111 (SEQ ID NO:1545), DOM10-176-112 (SEQ ID NO:1546), DOM10-176-113 (SEQ ID NO:1547), DOM10-176-114 (SEQ ID NO:1548), DOM10-176-115 (SEQ ID NO:1549), DOM10-176-116 (SEQ ID NO:1550), DOM10-176-117 (SEQ ID NO:1551), DOM10-176-500 (SEQ ID NO:1552), DOM10-176-501 (SEQ ID NO:1553), DOM10-176-502 (SEQ ID NO:1554), DOM10-176-503 (SEQ ID NO:1555), DOM10-176-504 (SEQ ID NO:1556), DOM10-176-505 (SEQ ID NO:1557), DOM10-176-506 (SEQ ID NO:1558), DOM10-176-507 (SEQ ID NO:1559), DOM10-176-508 (SEQ ID NO:1560), DOM10-176-509 (SEQ ID NO:1561), DOM10-176-510 (SEQ ID NO:1562), DOM10-176-511 (SEQ ID NO:1563), DOM10-176-512 (SEQ ID NO:1564), DOM10-176-513 (SEQ ID NO:1565), DOM10-176-514 (SEQ ID NO:1566), DOM10-176-515 (SEQ ID NO:1567), DOM10-176-516 (SEQ ID NO:1568), DOM10-176-517 (SEQ ID NO:1569), DOM10-176-518 (SEQ ID NO:1570), DOM10-176-519 (SEQ ID NO:1571), DOM10-176-520 (SEQ ID NO:1572), DOM10-176-521 (SEQ ID NO:1573), DOM10-176-522 (SEQ ID NO:1574), DOM10-176-523 (SEQ ID NO:1575), DOM10-176-524 (SEQ ID NO:1576), DOM10-176-525 (SEQ ID NO:1577), DOM10-176-526 (SEQ ID NO:1578), DOM10-176-527 (SEQ ID NO:1579), DOM10-176-528 (SEQ ID NO:1580), DOM10-176-529 (SEQ ID NO:1581), DOM10-176-530 (SEQ ID NO:1582), DOM10-176-531 (SEQ ID NO:1583), DOM10-176-532 (SEQ ID NO:1584), DOM10-176-533 (SEQ ID NO:1585), DOM10-176-534 (SEQ ID NO:1586), DOM10-176-535 (SEQ ID NO:1587), DOM10-176-536 (SEQ ID NO:1588), DOM10-176-537 (SEQ ID NO:1589), DOM10-176-538 (SEQ ID NO:1590), DOM10-176-539 (SEQ ID NO:1591), DOM10-176-540 (SEQ ID NO:1592), DOM10-176-541 (SEQ ID NO:1593), DOM10-176-542 (SEQ ID NO:1594), DOM10-176-543 (SEQ ID NO:1595), DOM10-176-544 (SEQ ID NO:1596), DOM10-176-545 (SEQ ID NO:1597), DOM10-176-546 (SEQ ID NO:1598), DOM10-176-547 (SEQ ID NO:1599), DOM10-176-548 (SEQ ID NO:1600), DOM10-176-549 (SEQ ID NO:1601), DOM10-176-550 (SEQ ID NO:1602), DOM10-176-551 (SEQ ID NO:1603), DOM10-176-552 (SEQ ID NO:1604), DOM10-176-553 (SEQ ID NO:1605), DOM10-176-554 (SEQ ID NO:1606), DOM10-176-555 (SEQ ID NO:1607), DOM10-176-556 (SEQ ID NO:1608), DOM10-176-557 (SEQ ID NO:1609), DOM10-176-558 (SEQ ID NO:1610), DOM10-176-559 (SEQ ID NO:1611), DOM10-176-560 (SEQ ID NO:1612), DOM10-176-561 (SEQ ID NO:1613), DOM10-176-562 (SEQ ID NO:1614), DOM10-176-563 (SEQ ID NO:1615), DOM10-176-564 (SEQ ID NO:1616), DOM10-176-565 (SEQ ID NO:1617), DOM10-176-566 (SEQ ID NO:1618), DOM10-176-567 (SEQ ID NO:1619), DOM10-176-568 (SEQ ID NO:1620), DOM10-176-569 (SEQ ID NO:1621), DOM10-176-570 (SEQ ID NO:1622), DOM10-176-571 (SEQ ID NO:1623), DOM10-176-572 (SEQ ID NO:1624), DOM10-176-573 (SEQ ID NO:1625), DOM10-176-574 (SEQ ID NO:1626), DOM10-176-575 (SEQ ID NO:1627), DOM10-176-576 (SEQ ID NO:1628), DOM10-176-577 (SEQ ID NO:1629), DOM10-176-578 (SEQ ID NO:1630), DOM10-176-579 (SEQ ID NO:1631), DOM10-176-580 (SEQ ID NO:1632), DOM10-176-581 (SEQ ID NO:1633), DOM10-176-582 (SEQ ID NO:1634), DOM10-176-583 (SEQ ID NO:1635), DOM10-176-584 (SEQ ID NO:1636), DOM10-176-585 (SEQ ID NO:1637), DOM10-176-586 (SEQ ID NO:1638), DOM10-176-587 (SEQ ID NO:1639), DOM10-176-588 (SEQ ID NO:1640), DOM10-176-589 (SEQ ID NO:1641), DOM10-176-590 (SEQ ID NO:1642), DOM10-176-591 (SEQ ID NO:1643), DOM10-176-592 (SEQ ID NO:1644), DOM10-176-593 (SEQ ID NO:1645), DOM10-176-594 (SEQ ID NO:1646), DOM10-176-595 (SEQ ID NO:1647), DOM10-176-596 (SEQ ID NO:1648), DOM10-176-597 (SEQ ID NO:1649), DOM10-176-598 (SEQ ID NO:1650), DOM10-176-599 (SEQ ID NO:1651), DOM10-176-600 (SEQ ID NO:1652), DOM10-176-601 (SEQ ID NO:1653), DOM10-176-602 (SEQ ID NO:1654), DOM10-176-603 (SEQ ID NO:1655), DOM10-176-604 (SEQ ID NO:1656), DOM10-176-605 (SEQ ID NO:1657), DOM10-176-606 (SEQ ID NO:1658), DOM10-176-607 (SEQ ID NO:1659), DOM10-176-608 (SEQ ID NO:1660), DOM10-176-609 (SEQ ID NO:1661), DOM10-176-610 (SEQ ID NO:1662), DOM10-176-611 (SEQ ID NO:1663), DOM10-176-612 (SEQ ID NO:1664), DOM10-176-613 (SEQ ID NO:1665), DOM10-176-614 (SEQ ID NO:1666), DOM10-176-615 (SEQ ID NO:1667), DOM10-176-616 (SEQ ID NO:1668), DOM10-176-617 (SEQ ID NO:1669), DOM10-176-618 (SEQ ID NO:1670), DOM10-176-619 (SEQ ID NO:1671), DOM10-176-620 (SEQ ID NO:1672), DOM10-176-621 (SEQ ID NO:1673), DOM10-176-622 (SEQ ID NO:1674), DOM10-176-623 (SEQ ID NO:1675), DOM10-176-624 (SEQ ID NO:1676), DOM10-176-625 (SEQ ID NO:1677), DOM10-176-626 (SEQ ID NO:1678), DOM10-176-627 (SEQ ID NO:1679), DOM10-176-628 (SEQ ID NO:1680), DOM10-176-629 (SEQ ID NO:1681), DOM10-176-630 (SEQ ID NO:1682), DOM10-176-631 (SEQ ID NO:1683), DOM10-176-632 (SEQ ID NO:1684), DOM10-176-633 (SEQ ID NO:1685), DOM10-176-634 (SEQ ID NO:1686), DOM10-176-635 (SEQ ID NO:1687), DOM10-176-636 (SEQ ID NO:1688), DOM10-176-637 (SEQ ID NO:1689), DOM10-176-638 (SEQ ID NO:1690), DOM10-176-639 (SEQ ID NO:1691), DOM10-176-640 (SEQ ID NO:1692), DOM10-176-641 (SEQ ID NO:1693), DOM10-176-643 (SEQ ID NO:1694), DOM10-176-644 (SEQ ID NO:1695), DOM10-176-645 (SEQ ID NO:1696), DOM10-176-646 (SEQ ID NO:1697), DOM10-176-647 (SEQ ID NO:1698), DOM10-176-648 (SEQ ID NO:1699), DOM10-176-649 (SEQ ID NO:1700), DOM10-176-650 (SEQ ID NO:1701), DOM10-176-651 (SEQ ID NO:1702), DOM10-176-652 (SEQ ID NO:1703), DOM10-176-653 (SEQ ID NO:1704), DOM10-176-654 (SEQ ID NO:1705), DOM10-176-655 (SEQ ID NO:1706), DOM10-176-656 (SEQ ID NO:1707), DOM10-176-657 (SEQ ID NO:1708), DOM10-176-658 (SEQ ID NO:1709), DOM10-176-659 (SEQ ID NO:1710), DOM10-176-660 (SEQ ID NO:1711), DOM10-176-661 (SEQ ID NO:1712), DOM10-176-662 (SEQ ID NO:1713), DOM10-176-663 (SEQ ID NO:1714), DOM10-176-664 (SEQ ID NO:1715), DOM10-176-665 (SEQ ID NO:1716), DOM10-176-666 (SEQ ID NO:1717), DOM10-176-667 (SEQ ID NO:1718), DOM10-176-668 (SEQ ID NO:1719), DOM10-176-669 (SEQ ID NO:1720), DOM10-176-670 (SEQ ID NO:1721), DOM10-176-671 (SEQ ID NO:1722), DOM10-176-672 (SEQ ID NO:1723), DOM10-176-673 (SEQ ID NO:1724), DOM10-176-674 (SEQ ID NO:1725), DOM10-176-675 (SEQ ID NO:1726), DOM10-253 (SEQ ID NO:1727), DOM10-255 (SEQ ID NO:1728), DOM10-272 (SEQ ID NO:1729), DOM10-307 (SEQ ID NO:1730), DOM10-319 (SEQ ID NO:1731) and DOM10-319-1 (SEQ ID NO:1732).

[0262] In some embodiments, the polypeptide domain that has a binding site with binding specificity for IL-13 (e.g., a dAb) comprises an amino acid sequence that has at least about 80%, at least about 85%, at least about 90%, at least about 91%, at least about 92%, at least about 93%, at least about 94%, at least about 95%, at least about 96%, at least about 97%, at least about 98%, or at least about 99% amino acid sequence identity with the amino acid sequence or a dAb selected from the group consisting of DOM10-236 (SEQ ID NO:2129), DOM10-238 (SEQ ID NO:2130), DOM10-241 (SEQ ID NO:2131), DOM10-245 (SEQ ID NO:2132), DOM10-249 (SEQ ID NO:2133), DOM10-250 (SEQ ID NO:2134), DOM10-251 (SEQ ID NO:2135), DOM10-254 (SEQ ID NO:2136), DOM10-256 (SEQ ID NO:2137), DOM10-259 (SEQ ID NO:2138), DOM10-260 (SEQ ID NO:2139), DOM10-261 (SEQ ID NO:2140), DOM10-263 (SEQ ID NO:2141), DOM10-264 (SEQ ID NO:2142), DOM10-273 (SEQ ID NO:2143), DOM10-278 (SEQ ID NO:2144), DOM10-279 (SEQ ID NO:2145), DOM10-281 (SEQ ID NO:2146), DOM10-282 (SEQ ID NO:2147), DOM10-283 (SEQ ID NO:2148), DOM10-400 (SEQ ID NO:2149), DOM10-401 (SEQ ID NO:2150), DOM10-402 (SEQ ID NO:2151), DOM10-404 (SEQ ID NO:2152), DOM10-406 (SEQ ID NO:2153), DOM10-407 (SEQ ID NO:2154), DOM10-409 (SEQ ID NO:2155), DOM10-410 (SEQ ID NO:2156), DOM10-414 (SEQ ID NO:2157), DOM10-415 (SEQ ID NO:2158), DOM10-416 (SEQ ID NO:2159), DOM10-418 (SEQ ID NO:2160), DOM10-420 (SEQ ID NO:2161), DOM10-422 (SEQ ID NO:2162), DOM10-423 (SEQ ID NO:2163), DOM10-424 (SEQ ID NO:2164), DOM10-425 (SEQ ID NO:2165), DOM10-426 (SEQ ID NO:2166), DOM10-427 (SEQ ID NO:2167), DOM10-428 (SEQ ID NO:2168), DOM10-429 (SEQ ID NO:2169), DOM10-430 (SEQ ID NO:2170), DOM10-431 (SEQ ID NO:2171), DOM10-432 (SEQ ID NO:2172), DOM10-433 (SEQ ID NO:2173), DOM10-467 (SEQ ID NO:2174), DOM10-468 (SEQ ID NO:2175), DOM10-469 (SEQ ID NO:2176), DOM10-470 (SEQ ID NO:2177), DOM10-234 (SEQ ID NO:2178), DOM10-235 (SEQ ID NO:2179), DOM10-237 (SEQ ID NO:2180), DOM10-239 (SEQ ID NO:2181), DOM10-240 (SEQ ID NO:2182), DOM10-242 (SEQ ID NO:2183), DOM10-243 (SEQ ID NO:2184), DOM10-244 (SEQ ID NO:2185), DOM10-246 (SEQ ID NO:2186), DOM10-247 (SEQ ID NO:2187), DOM10-248 (SEQ ID NO:2188), DOM10-252 (SEQ ID NO:2189), DOM10-257 (SEQ ID NO:2190), DOM10-258 (SEQ ID NO:2191), DOM10-262 (SEQ ID NO:2192), DOM10-265 (SEQ ID NO:2193), DOM10-266 (SEQ ID NO:2194), DOM10-274 (SEQ ID NO:2195), DOM10-275 (SEQ ID NO:2196), DOM10-276 (SEQ ID NO:2197), DOM10-277 (SEQ ID NO:2198), DOM10-280 (SEQ ID NO:2199), DOM10-403 (SEQ ID NO:2200), DOM10-405 (SEQ ID NO:2201), DOM10-408 (SEQ ID NO:2202), DOM10-411 (SEQ ID NO:2203), DOM10-412 (SEQ ID NO:2204), DOM10-413 (SEQ ID NO:2205), DOM10-417 (SEQ ID NO:2206), DOM10-419 (SEQ ID NO:2207), DOM10-472 (SEQ ID NO:2208), DOM10-203 (SEQ ID NO:2209), DOM10-205 (SEQ ID NO:2210), DOM10-208 (SEQ ID NO:2211), DOM10-218 (SEQ ID NO:2212), DOM10-219 (SEQ ID NO:2213), DOM10-220 (SEQ ID NO:2214), DOM10-225 (SEQ ID NO:2215), DOM10-228 (SEQ ID NO:2216), DOM10-229 (SEQ ID NO:2217), DOM10-230 (SEQ ID NO:2218), DOM10-231 (SEQ ID NO:2219), DOM10-268 (SEQ ID NO:2220), DOM10-201 (SEQ ID NO:2221), DOM10-202 (SEQ ID NO:2222), DOM10-204 (SEQ ID NO:2223), DOM10-206 (SEQ ID NO:2224), DOM10-207 (SEQ ID NO:2225), DOM10-209 (SEQ ID NO:2226), DOM10-210 (SEQ ID NO:2227), DOM10-211 (SEQ ID NO:2228), DOM10-213 (SEQ ID NO:2229), DOM10-214 (SEQ ID NO:2230), DOM10-215 (SEQ ID NO:2231), DOM10-216 (SEQ ID NO:2232), DOM10-217 (SEQ ID NO:2233), DOM10-221 (SEQ ID NO:2234), DOM10-223 (SEQ ID NO:2235), DOM10-224 (SEQ ID NO:2236), DOM10-227 (SEQ ID NO:2237), DOM10-232 (SEQ ID NO:2238), DOM10-267 (SEQ ID NO:2239), DOM10-270 (SEQ ID NO:2240), DOM10-275-1 (SEQ ID NO:2241), DOM10-276-2 (SEQ ID NO:2242), DOM10-276-3 (SEQ ID NO:2243), DOM10-275-3 (SEQ ID NO:2244), DOM10-277-2 (SEQ ID NO:2245), DOM10-277-3 (SEQ ID NO:2246), DOM10-273-1 (SEQ ID NO:2247), DOM10-273-2 (SEQ ID NO:2248), DOM10-275-2 (SEQ ID NO:2249), DOM10-275-4 (SEQ ID NO:2250), DOM10-276-1 (SEQ ID NO:2251), DOM10-276-4 (SEQ ID NO:2252), DOM10-277-1 (SEQ ID NO:2253), DOM10-275-13 (SEQ ID NO:2254), DOM10-275-15 (SEQ ID NO:2255), DOM10-275-20 (SEQ ID NO:2256), DOM10-275-8 (SEQ ID NO:2257), DOM10-276-13 (SEQ ID NO:2258), DOM10-276-14 (SEQ ID NO:2259), DOM10-276-15 (SEQ ID NO:2260), DOM10-276-17 (SEQ ID NO:2261), DOM10-276-7 (SEQ ID NO:2262), DOM10-276-8 (SEQ ID NO:2263), DOM10-275-11 (SEQ ID NO:2264), DOM10-275-12 (SEQ ID NO:2265), DOM10-275-14 (SEQ ID NO:2266), DOM10-275-16 (SEQ ID NO:2267), DOM10-275-17 (SEQ ID NO:2268), DOM10-275-5 (SEQ ID NO:2269), DOM10-275-6 (SEQ ID NO:2270), DOM10-275-7 (SEQ ID NO:2271), DOM10-275-9 (SEQ ID NO:2272), DOM10-276-10 (SEQ ID NO:2273), DOM10-276-11 (SEQ ID NO:2274), DOM10-276-12 (SEQ ID NO:2275), DOM10-276-16 (SEQ ID NO:2276), DOM10-276-5 (SEQ ID NO:2277), DOM10-276-6 (SEQ ID NO:2278), DOM10-276-9 (SEQ ID NO:2279), DOM10-212 (SEQ ID NO:2280), DOM10-53-424 (SEQ ID NO:2281), DOM10-53-425 (SEQ ID NO:2282), DOM10-53-426 (SEQ ID NO:2283), DOM10-53-422 (SEQ ID NO:2284), DOM10-53-423 (SEQ ID NO:2285), DOM10-53-613 (SEQ ID NO:2286), DOM10-53-517 (SEQ ID NO:2287), DOM10-53-519 (SEQ ID NO:2288), DOM10-53-520 (SEQ ID NO:2289), DOM10-53-521 (SEQ ID NO:2290), DOM10-53-522 (SEQ ID NO:2291), DOM10-53-526 (SEQ ID NO:2292), DOM10-53-527 (SEQ ID NO:2293), DOM10-53-528 (SEQ ID NO:2294), DOM10-53-518 (SEQ ID NO:2295), DOM10-53-523 (SEQ ID NO:2296), DOM10-53-524 (SEQ ID NO:2297), DOM10-53-525 (SEQ ID NO:2298), DOM10-53-601 (SEQ ID NO:2299), DOM10-53-602 (SEQ ID NO:2300), DOM10-53-605 (SEQ ID NO:2301), DOM10-53-606 (SEQ ID NO:2302), DOM10-53-607 (SEQ ID NO:2303), DOM10-53-608 (SEQ ID NO:2304), DOM10-53-609 (SEQ ID NO:2305), DOM10-53-610 (SEQ ID NO:2306), DOM10-53-611 (SEQ ID NO:2307), DOM10-53-612 (SEQ ID NO:2308), DOM10-53-603 (SEQ ID NO:2309), DOM10-53-604 (SEQ ID NO:2310), DOM10-53-429 (SEQ ID NO:2311), DOM10-53-432 (SEQ ID NO:2312), DOM10-53-433 (SEQ ID NO:2313), DOM10-53-435 (SEQ ID NO:2314), DOM10-53-430 (SEQ ID NO:2315), DOM10-53-431 (SEQ ID NO:2316), DOM10-53-434 (SEQ ID NO:2317), DOM10-53-436 (SEQ ID NO:2318), DOM10-53-437 (SEQ ID NO:2319), DOM10-53-438 (SEQ ID NO:2320), DOM10-53-440 (SEQ ID NO:2321), DOM10-53-439 (SEQ ID NO:2322), DOM10-53-441 (SEQ ID NO:2323), DOM10-53-442 (SEQ ID NO:2324), DOM10-53-443 (SEQ ID NO:2325), DOM10-53-444 (SEQ ID NO:2326), DOM10-53-445 (SEQ ID NO:2327), DOM10-53-446 (SEQ ID NO:2328), DOM10-53-447 (SEQ ID NO:2329), DOM10-53-449 (SEQ ID NO:2330), DOM10-53-448 (SEQ ID NO:2331), DOM10-53-450 (SEQ ID NO:2332), DOM10-53-451 (SEQ ID NO:2333), DOM10-53-452 (SEQ ID NO:2334), DOM10-53-453 (SEQ ID NO:2335), DOM10-53-454 (SEQ ID NO:2336), DOM10-53-455 (SEQ ID NO:2337), DOM10-53-456 (SEQ ID NO:2338), DOM10-53-457 (SEQ ID NO:2339), DOM10-53-458 (SEQ ID NO:2340), DOM10-53-459 (SEQ ID NO:2341), DOM10-53-461 (SEQ ID NO:2342), DOM10-53-462 (SEQ ID NO:2343), DOM10-53-465 (SEQ ID NO:2344), DOM10-53-466 (SEQ ID NO:2345), DOM10-53-467 (SEQ ID NO:2346), DOM10-53-468 (SEQ ID NO:2347), DOM10-53-460 (SEQ ID NO:2348), DOM10-53-463 (SEQ ID NO:2349), DOM10-53-464 (SEQ ID NO:2350), DOM10-53-469 (SEQ ID NO:2351), DOM10-53-471 (SEQ ID NO:2352), DOM10-53-470 (SEQ ID NO:2353), DOM10-53-533 (SEQ ID NO:2354), DOM10-53-534 (SEQ ID NO:2355), DOM10-53-535 (SEQ ID NO:2356), DOM10-53-537 (SEQ ID NO:2357), DOM10-53-538 (SEQ ID NO:2358), DOM10-53-539 (SEQ ID NO:2359), DOM10-53-540 (SEQ ID NO:2360), DOM10-53-531 (SEQ ID NO:2361), DOM10-53-532 (SEQ ID NO:2362), DOM10-53-536 (SEQ ID NO:2363), DOM10-53-542 (SEQ ID NO:2364), DOM10-53-541 (SEQ ID NO:2365), DOM10-53-473 (SEQ ID NO:2366), DOM10-53-472 (SEQ ID NO:2367), DOM10-53-475 (SEQ ID NO:2368), DOM10-53-474 (SEQ ID NO:2369), DOM10-53-543 (SEQ ID NO:2370), DOM10-53-544 (SEQ ID NO: 2371), DOM10-53-545 (SEQ ID NO:2372), DOM10-53-548 (SEQ ID NO:2373), DOM10-53-546 (SEQ ID NO:2374), DOM10-53-549 (SEQ ID NO:2375), DOM10-53-547 (SEQ ID NO:2376), DOM10-53-550 (SEQ ID NO:2377), DOM10-53-551 (SEQ ID NO:2378), DOM10-53-560 (SEQ ID NO:2379), DOM10-53-565 (SEQ ID NO:2380), DOM10-53-559 (SEQ ID NO:2381), DOM10-53-561 (SEQ ID NO:2382), DOM10-53-562 (SEQ ID NO:2383), DOM10-53-563 (SEQ ID NO:2384), DOM10-53-564 (SEQ ID NO:2385), DOM10-53-566 (SEQ ID NO:2386), DOM10-53-554 (SEQ ID NO:2387), DOM10-53-552 (SEQ ID NO:2388), DOM10-53-553 (SEQ ID NO:2389), DOM10-53-558 (SEQ ID NO:2390), DOM10-53-556 (SEQ ID NO:2391) and DOM10-53-557 (SEQ ID NO:2392).

[0263] In preferred embodiments, the polypeptide domain that has a binding site with binding specificity for IL-13 (e.g., a dAb) comprises an amino acid sequence that has at least about 90%, at least about 91%, at least about 92%, at least about 93%, at least about 94%, at least about 95%, at least about 96%, at least about 97%, at least about 98%, or at least about 99% amino acid sequence identity with the amino acid sequence of DOM-10-53 (SEQ ID NO:967) or DOM10-176-535 (SEQ ID NO:1587). For example, the polypeptide domain that has a binding site with binding specificity for IL-13 can comprise the amino acid sequence of DOM10-176-535 (SEQ ID NO:1587), DOM10-53-223 (SEQ ID NO:1090), DOM10-53-234 (SEQ ID NO:1101), DOM10-53-316 (SEQ ID NO:1182), DOM10-53-339 (SEQ ID NO:1203), DOM10-53-344 (SEQ ID NO:1208), DOM10-53-396 (SEQ ID NO:1260), DOM10-53-474 (SEQ ID NO:2369) and DOM10-275-1 (SEQ ID NO:2241).

[0264] In some embodiments, the polypeptide domain that has a binding site with binding specificity for IL-13 competes with any of the dAbs disclosed herein for binding to IL-13.

[0265] Preferably the polypeptide domain that has a binding site with binding specificity for IL-13 is an immunoglobulin single variable domain. The polypeptide domain that has a binding site with binding specificity for IL-13 can comprise any suitable immunoglobulin variable domain, and preferably comprises a human variable domain or a variable domain that comprises human framework regions. In certain embodiments, the polypeptide domain that has a binding site with binding specificity for IL-13 comprises a universal framework, as described herein.

[0266] The ligand of the invention (e.g., ligand that has binding specificity for IL-4 and IL-13, ligand that has binding specificity for IL-13) can comprise a non-immunoglobulin binding moiety that has binding specificity for IL-13 and inhibits a function of IL-13 (e.g., binding to receptor), wherein the non-immunoglobulin binding moiety comprises one, two or three of the CDRs of a V_{H}, V_{L}., or V_{HH} that binds IL-13 and a suitable scaffold. In certain embodiments, the non-immunoglobulin binding moiety comprises CDR3 but not CDR1 or CDR2 of a V_{H}, V_{L}, or V_{HH} that binds IL-13 and a suitable scaffold. In other embodiments, the non-immunoglobulin binding moiety comprises CDR1 and CDR2, but not CDR3 of a V_{H}, V_{L} or V_{HH} that binds IL-13 and a suitable scaffold. In other embodiments, the non-immunoglobulin binding moiety comprises CDR1, CDR2 and CDR3 of a V_{H}, V_{L} or V_{HH} that binds IL-13 and a suitable scaffold. Preferably, the CDR or CDRs of the ligand of these embodiments is a CDR or CDRs of an anti-IL-13 dAb described herein. Preferably, the non-immunoglobulin binding moiety comprises one, two, or three of the CDRs of one of the anti-IL-13 dAbs disclosed herein. In other embodiments, the ligand (e.g., ligand that has binding specificity for IL-4 and IL-13, ligand that has binding specificity for IL-13) comprises only CDR3 of a V_{H}, V_{L} or V_{HH} that binds IL-13. The non-immunoglobulin domain can comprise an amino acid sequence that has one or more regions that have sequence identity to one, two or three of the CDRs of an anti-IL-13 dAb described herein. For example, the non-immunoglobulin domain can have an amino acid sequence that contains at least about 50%, at least about 60%, at least about 70%, at least about 80%, or at least about 90% sequence identity with CDR1, CDR2 and/or CDR3 of an anti-IL13 dAb disclosed herein. Even more preferably, the non-immunoglobulin binding moiety comprises one, two, or three of the CDRs of DOM10-176-535 (SEQ ID NO:1587), DOM10-53-223 (SEQ ID NO:1090), DOM10-53-234 (SEQ ID NO:1101), DOM10-53-316 (SEQ ID NO:1182), DOM10-53-339 (SEQ ID NO:1203), DOM10-53-344 (SEQ ID NO:1208) and DOM10-53-396 (SEQ ID NO:1260).

[0267] In certain embodiments, a polypeptide domain that has a binding site with binding specificity for IL-13 resists aggregation, unfolds reversibly, comprises a framework region and/or is secreted as described above for the polypeptide domain that has a binding site with binding specificity for IL-4

dAb Monomers that Bind Serum Albumin

[0268] The ligands of the invention can further comprise a dAb monomer that binds serum albumin (SA) with a K_{d} of 1 nM to 500 μM (i.e., ×10⁻⁹ to 5×10⁻⁴), preferably 100 nM to 10 μM. Preferably, for a ligand comprising an anti-SA dAb, the binding (e.g. K_{d} and/or K_{off} as measured by surface plasmon resonance, (e.g., using BiaCore)) of the ligand its target(s) is from 1 to 100000 times (preferably 100 to 100000, more preferably 1000 to 100000, or 10000 to 100000 times) stronger than for SA. Preferably, the serum albumin is human serum albumin (HSA). In one embodiment, the first dAb (or a dAb monomer) binds SA (e.g., HSA) with a K_{d} of approximately 50, preferably 70, and more preferably 100, 150 or 200 nM.

[0269] In certain embodiments, the dAb monomer that binds SA resists aggregation, unfolds reversibly and/or comprises a framework region as described above for dAb monomers that bind IL-4.

[0270] In particular embodiments, the antigen-binding fragment of an antibody that binds serum albumin is a dAb that binds human serum albumin. In certain embodiments, the dAb binds human serum albumin and competes for binding to albumin with a dAb selected from the group consisting of

DOM7r-1 (SEQ ID NO:1736), DOM7r-3 (SEQ ID NO:1737), DOM7r-4 (SEQ ID NO:1738), DOM7r-5 (SEQ ID NO:1739), DOM7r-7 (SEQ ID NO:1740), DOM7r-8 (SEQ ID NO:1741), DOM7h-2 (SEQ ID NO:1742), DOM7h-3 (SEQ ID NO:1743), DOM7h-4 (SEQ ID NO:1744), DOM7h-6 (SEQ ID NO:1745), DOM7h-1 (SEQ ID NO:1746), DOM7h-7 (SEQ ID NO:1747), DOM7h-22 (SEQ ID NO:1748), DOM7h-23 (SEQ ID NO:1749), DOM7h-24 (SEQ ID NO:1750), DOM7h-25 (SEQ ID NO:1751), DOM7h-26 (SEQ ID NO:1752), DOM7h-21 (SEQ ID NO:1753), DOM7h-27 (SEQ ID NO:1754), DOM7h-8 (SEQ ID NO:1756), DOM7r-13 (SEQ ID NO:1757), DOM7r-14 (SEQ ID NO:1758), DOM7r-15 (SEQ ID NO:1759), DOM7r-16 (SEQ ID NO:1760), DOM7r-17 (SEQ ID NO:1761), DOM7r-18 (SEQ ID NO:1762), DOM7r-19 (SEQ ID NO:1763), DOM7r-20 (SEQ ID NO:1764), DOM7r-21 (SEQ ID NO:1765), DOM7r-22 (SEQ ID NO:1766), DOM7r-23 (SEQ ID NO:1767), DOM7r-24 (SEQ ID NO:1768), DOM7r-25 (SEQ ID NO:1769), DOM7r-26 (SEQ ID NO:1770), DOM7r-27 (SEQ ID NO:1771), DOM7r-28 (SEQ ID NO:1772), DOM7r-29 (SEQ ID NO:1773), DOM7r-30 (SEQ ID NO:1774), DOM7r-31 (SEQ ID NO:1775), DOM7r-32 (SEQ ID NO:1776), and DOM7r-33 (SEQ ID NO:1777).

[0271] In certain embodiments, the dAb binds human serum albumin and comprises an amino acid sequence that has at least about 80%, or at least about 85%, or at least about 90%, or at least about 95%, or at least about 96%, or at least about 97%, or at least about 98%, or at least about 99% amino acid sequence identity with the amino acid sequence of a dAb selected from the group consisting of DOM7r-1 (SEQ ID NO:1736), DOM7r-3 (SEQ ID NO:1737), DOM7r-4 (SEQ ID NO:1738), DOM7r-5 (SEQ ID NO:1739), DOM7r-7 (SEQ ID NO:1740), DOM7r-8 (SEQ ID NO:1741), DOM7h-2 (SEQ ID NO:1742), DOM7h-3 (SEQ ID NO:1743), DOM7h-4 (SEQ ID NO:1744), DOM7h-6 (SEQ ID NO:1745), DOM7h-1 (SEQ ID NO:1746), DOM7h-7 (SEQ ID NO:1747), DOM7h-22 (SEQ ID NO:1748), DOM7h-23 (SEQ ID NO:1749), DOM7h-24 (SEQ ID NO:1750), DOM7h-25 (SEQ ID NO:1751), DOM7h-26 (SEQ ID NO:1752), DOM7h-21 (SEQ ID NO:1753), DOM7h-27 (SEQ ID NO:1754), DOM7h-8 (SEQ ID NO:1756), DOM7r-13 (SEQ ID NO:1757), DOM7r-14 (SEQ ID NO:1758), DOM7r-15 (SEQ ID NO:1759),

DOM7r-16 (SEQ ID NO:1760), DOM7r-17 (SEQ ID NO:1761), DOM7r-18 (SEQ ID NO:1762), DOM7r-19 (SEQ ID NO:1763), DOM7r-20 (SEQ ID NO:1764), DOM7r-21 (SEQ ID NO:1765), DOM7r-22 (SEQ ID NO:1766), DOM7r-23 (SEQ ID NO:1767), DOM7r-24 (SEQ ID NO:1768), DOM7r-25 (SEQ ID NO:1769), DOM7r-26 (SEQ ID NO:1770), DOM7r-27 (SEQ ID NO:1771), DOM7r-28 (SEQ ID NO:1772), DOM7r-29 (SEQ ID NO:1773), DOM7r-30 (SEQ ID NO:1774), DOM7r-31 (SEQ ID NO:1775), DOM7r-32 (SEQ ID NO:1776), and DOM7r-33 (SEQ ID NO:1777).

[0272] For example, the dAb that binds human serum albumin can comprise an amino acid sequence that has at least about 90%, or at least about 95%, or at least about 96%, or at least about 97%, or at least about 98%, or at least about 99% amino acid sequence identity with DOM7h-2 (SEQ ID NO:1742), DOM7h-3 (SEQ ID NO:1743), DOM7h-4 (SEQ ID NO:1744), DOM7h-6 (SEQ ID NO:1745), DOM7h-1 (SEQ ID NO:1746), DOM7h-7 (SEQ ID NO:1747), DOM7h-8 (SEQ ID NO:1756), DOM7r-13 (SEQ ID NO:1757), DOM7r-14 (SEQ ID NO:1758), DOM7h-22 (SEQ ID NO:1748), DOM7h-23 (SEQ ID NO:1749), DOM7h-24 (SEQ ID NO:1750), DOM7h-25 (SEQ ID NO:1751), DOM7h-26 (SEQ ID NO:1752), DOM7h-21 (SEQ ID NO:1753), and DOM7h-27 (SEQ ID NO:1754).

[0273] Amino acid sequence identity is preferably determined using a suitable sequence alignment algorithm and default parameters, such as BLAST P (Karlin and Altschul, Proc. Natl. Acad. Sci. USA, 87(6):2264-2268 (1990)).

[0274] In more particular embodiments, the dAb is a V_{κ} dAb that binds human serum albumin and has an amino acid sequence selected from the group consisting of DOM7h-2 (SEQ ID NO:1742), DOM7h-3 (SEQ ID NO:1743), DOM7h-4 (SEQ ID NO:1744), DOM7h-6 (SEQ ID NO:1745), DOM7h-1 (SEQ ID NO:1746), DOM7h-7 (SEQ ID NO:1747), DOM7h-8 (SEQ ID NO:1756), DOM7r-13 (SEQ ID NO:1757), and DOM7r-14 (SEQ ID NO:1758), or a V_{H} dAb that has an amino acid sequence selected from the group consisting of: DOM7h-22 (SEQ ID NO:1748), DOM7h-23 (SEQ ID NO:1749), DOM7h-24 (SEQ ID NO:1750), DOM7h-25 (SEQ ID NO:1751), DOM7h-26 (SEQ ID NO:1752), DOM7h-21 (SEQ ID NO:1753), DOM7h-27 (SEQ ID NO:1754). In other embodiments, the antigen-binding fragment of an antibody that binds serum albumin is a dAb that binds human serum albumin and comprises the CDRs of any of the foregoing amino acid sequences.

[0275] Suitable Camelid V_{HH} that bind serum albumin include those disclosed in WO 2004/041862 (Ablynx N.V.) and herein, such as Sequence A (SEQ ID NO:1778), Sequence B (SEQ ID NO:1779), Sequence C (SEQ ID NO:1780), Sequence D (SEQ ID NO:1781), Sequence E (SEQ ID NO:1782), Sequence F (SEQ ID NO:1783), Sequence G (SEQ ID NO:1784), Sequence H (SEQ ID NO:1785), Sequence I (SEQ ID NO:1786), Sequence J (SEQ ID NO:1787), Sequence K (SEQ ID NO:1788), Sequence L (SEQ ID NO:1789), Sequence M (SEQ ID NO:1790), Sequence N (SEQ ID NO:1791), Sequence 0 (SEQ ID NO:1792), Sequence P (SEQ ID NO:1793), Sequence Q (SEQ ID NO:1794). In certain embodiments, the Camelid V_{HH} binds human serum albumin and comprises an amino acid sequence that has at least about 80%, or at least about 85%, or at least about 90%, or at least about 95%, or at least about 96%, or at least about 97%, or at least about 98%, or at least about 99% amino acid sequence identity with any one of SEQ ID NOS:1778-1794.

[0276] Amino acid sequence identity is preferably determined using a suitable sequence alignment algorithm and default parameters, such as BLAST P (Karlin and Altschul, Proc. Natl. Acad. Sci. USA, 87(6):2264-2268 (1990)).

[0277] In some embodiments, the ligand comprises an anti-serum albumin dAb that competes with any anti-serum albumin dAb disclosed herein for binding to serum albumin (e.g., human serum albumin).

### Nucleic Acid Molecules, Vectors and Host Cells

[0278] The invention also provides isolated and/or recombinant nucleic acid molecules encoding ligands, (dual-specific ligands and multispecific ligands) as described herein.

[0279] Nucleic acids referred to herein as “isolated” are nucleic acids which have been separated away from the nucleic acids of the genomic DNA or cellular RNA of their source of origin (e.g., as it exists in cells or in a mixture of nucleic acids such as a library), and include nucleic acids obtained by methods described herein or other suitable methods, including essentially pure nucleic acids, nucleic acids produced by chemical synthesis, by combinations of biological and chemical methods, and recombinant nucleic acids which are isolated (see e.g., Daugherty, B. L. et al., Nucleic Acids Res., 19(9): 2471-2476 (1991); Lewis, A. P. and J. S. Crowe, Gene, 101: 297-302 (1991)).

[0280] Nucleic acids referred to herein as “recombinant” are nucleic acids which have been produced by recombinant DNA methodology, including those nucleic acids that are generated by procedures which rely upon a method of artificial recombination, such as the polymerase chain reaction (PCR) and/or cloning into a vector using restriction enzymes.

[0281] In certain embodiments, the isolated and/or recombinant nucleic acid comprises a nucleotide sequence encoding a ligand, as described herein, wherein said ligand comprises an amino acid sequence that has at least about 80%, at least about 85%, at least about 90%, at least about 91%, at least about 92%, at least about 93%, at least about 94%, at least about 95%, at least about 96%, at least about 97%, at least about 98%, or at least about 99% amino acid sequence identity with the amino acid sequence of a dAb that binds IL-4 disclosed herein, or a dAb that binds IL-13 disclosed herein.

[0282] For example, in some embodiments, the isolated and/or recombinant nucleic acid comprises a nucleotide sequence encoding a ligand that has binding specificity for IL-4, as described herein, wherein said ligand comprises an amino acid sequence that has at least about 80%, at least about 85%, at least about 90%, at least about 91%, at least about 92%, at least about 93%, at least about 94%, at least about 95%, at least about 96%, at least about 97%, at least about 98%, or at least about 99% amino acid sequence identity with the amino acid sequence of a dAb selected from the group consisting of DOM9-15 (SEQ ID NO:175), DOM9-17(SEQ ID NO:176), DOM9-23 (SEQ ID NO:177), DOM9-24 (SEQ ID NO:178), DOM9-25 (SEQ ID NO:179), DOM9-27 (SEQ ID NO:180), DOM9-28 (SEQ ID NO:181), DOM9-29 (SEQ ID NO:182), DOM9-30 (SEQ ID NO:183), DOM9-31 (SEQ ID NO:184), DOM9-32 (SEQ ID NO:185), DOM9-33 (SEQ ID NO:186), DOM9-50 (SEQ ID NO:187), DOM9-57 (SEQ ID NO:188), DOM9-59 (SEQ ID NO:189), DOM9-63 (SEQ ID NO:190), DOM9-67 (SEQ ID NO:191), DOM9-68 (SEQ ID NO:192), DOM9-70 (SEQ ID NO:193), DOM9-79 (SEQ ID NO:194), DOM9-82 (SEQ ID NO:195), DOM9-86 (SEQ ID NO:196), DOM9-94 (SEQ ID NO:197), DOM9-108 (SEQ ID NO:198), DOM9-112 (SEQ ID NO:199), DOM9-112-1 (SEQ ID NO:200), DOM9-112-2 (SEQ ID NO:201), DOM9-112-3 (SEQ ID NO:202), DOM9-112-4 (SEQ ID NO:203), DOM9-112-5 (SEQ ID NO:204), DOM9-112-6 (SEQ ID NO:205), DOM9-112-7 (SEQ ID NO:206), DOM9-112-8 (SEQ ID NO:207), DOM9-112-9 (SEQ ID NO:208), DOM9-112-10 (SEQ ID NO:209), DOM9-112-11 (SEQ ID NO:210), DOM9-112-12 (SEQ ID NO:211), DOM9-112-13 (SEQ ID NO:212), DOM9-112-14 (SEQ ID NO:213), DOM9-112-15 (SEQ ID NO:214), DOM9-112-16 (SEQ ID NO:215), DOM9-112-17 (SEQ ID NO:216), DOM9-112-18 (SEQ ID NO:217), DOM9-112-19 (SEQ ID NO:218), DOM9-112-20 (SEQ ID NO:219), DOM9-112-21 (SEQ ID NO:220), DOM9-112-22 (SEQ ID NO:221), DOM9-112-23 (SEQ ID NO:222), DOM9-112-25 (SEQ ID NO:223), DOM9-112-81 (SEQ ID NO:224), DOM9-112-82 (SEQ ID NO:225), DOM9-112-83 (SEQ ID NO:226), DOM9-112-84 (SEQ ID NO:227), DOM9-112-85 (SEQ ID NO:228), DOM9-112-86 (SEQ ID NO:229), DOM9-112-87 (SEQ ID NO:230), DOM9-112-88 (SEQ ID NO:231), DOM9-112-89 (SEQ ID NO:232), DOM9-112-90 (SEQ ID NO:233), DOM9-112-91 (SEQ ID NO:234), DOM9-112-92 (SEQ ID NO:235), DOM9-112-93 (SEQ ID NO:236), DOM9-112-94 (SEQ ID NO:237), DOM9-112-95 (SEQ ID NO:238), DOM9-112-96 (SEQ ID NO:239), DOM9-112-97 (SEQ ID NO:240), DOM9-112-98 (SEQ ID NO:241), DOM9-112-99 (SEQ ID NO:242), DOM9-112-100 (SEQ ID NO:243), DOM9-112-101 (SEQ ID NO:244), DOM9-1132-102 (SEQ ID NO:245), DOM9-112-103 (SEQ ID NO:246), DOM9-112-104 (SEQ ID NO:247), DOM9-112-105 (SEQ ID NO:248), DOM9-112-106 (SEQ ID NO:249), DOM9-112-107 (SEQ ID NO:250), DOM9-112-108 (SEQ ID NO:251), DOM9-112-109 (SEQ ID NO:252), DOM9-112-110 (SEQ ID NO:253), DOM9-112-111 (SEQ ID NO:254), DOM9-112-112 (SEQ ID NO:255), DOM9-112-113 (SEQ ID NO:256), DOM9-112-114 (SEQ ID NO:257), DOM9-112-115 (SEQ ID NO:258), DOM9-112-116 (SEQ ID NO:259), DOM9-112-117 (SEQ ID NO:260), DOM9-112-118 (SEQ ID NO:261), DOM9-112-119 (SEQ ID NO:262), DOM9-112-120 (SEQ ID NO:263), DOM9-112-121 (SEQ ID NO:264), DOM9-112-122 (SEQ ID NO:265), DOM9-112-123 (SEQ ID NO:266), DOM9-112-124 (SEQ ID NO:267), DOM9-112-125 (SEQ ID NO:268), DOM9-112-126 (SEQ ID NO:269), DOM9-112-127 (SEQ ID NO:270), DOM9-112-128 (SEQ ID NO:271), DOM9-112-134 (SEQ ID NO:272), DOM9-112-135 (SEQ ID NO:273), DOM9-112-136 (SEQ ID NO:274), DOM9-112-137 (SEQ ID NO:275), DOM9-112-138 (SEQ ID NO:276), DOM9-112-140 (SEQ ID NO:277), DOM9-112-141 (SEQ ID NO:278), DOM9-112-142 (SEQ ID NO:279), DOM9-112-143 (SEQ ID NO:280), DOM9-112-144 (SEQ. ID NO:281), DOM9-112-145 (SEQ ID NO:282), DOM9-112-146 (SEQ ID NO:283), DOM9-112-147 (SEQ ID NO:284), DOM9-112-148 (SEQ ID NO:285), DOM9-112-149 (SEQ ID NO:286), DOM9-112-150 (SEQ ID NO:287), DOM9-112-151 (SEQ ID NO:288), DOM9-112-152 (SEQ ID NO:289), DOM9-112-153 (SEQ ID NO:290), DOM9-112-154 (SEQ ID NO:291), DOM9-112-155 (SEQ ID NO:292), DOM9-112-156 (SEQ ID NO:293), DOM9-112-157 (SEQ ID NO:294), DOM9-112-158 (SEQ ID NO:295), DOM9-112-159 (SEQ ID NO:296), DOM9-112-160 (SEQ ID NO:297), DOM9-112-161 (SEQ ID NO:298), DOM9-112-162 (SEQ ID NO:299), DOM9-112-163 (SEQ ID NO:300), DOM9-112-164 (SEQ ID NO:301), DOM9-112-165 (SEQ ID NO:302), DOM9-112-166 (SEQ ID NO:303), DOM9-112-167 (SEQ ID NO:304), DOM9-112-168 (SEQ ID NO:305), DOM9-112-169 (SEQ ID NO:306), DOM9-112-170 (SEQ ID NO:307), DOM9-112-171 (SEQ ID NO:308), DOM9-112-172 (SEQ ID NO:309), DOM9-112-173 (SEQ ID NO:310), DOM9-112-174 (SEQ ID NO:311), DOM9-112-175 (SEQ ID NO:312), DOM9-112-176 (SEQ ID NO:313), DOM9-112-177 (SEQ ID NO:314), DOM9-112-178 (SEQ ID NO:315), DOM9-112-179 (SEQ ID NO:316), DOM9-112-180 (SEQ ID NO:317), DOM9-112-181 (SEQ ID NO:318), DOM9-112-182 (SEQ ID NO:319), DOM9-112-183 (SEQ ID NO:320), DOM9-112-184 (SEQ ID NO:321), DOM9-112-185 (SEQ ID NO:322), DOM9-112-186 (SEQ ID NO:323), DOM9-112-187 (SEQ ID NO:324), DOM9-112-188 (SEQ ID NO:325), DOM9-112-189 (SEQ ID NO:326), DOM9-112-190 (SEQ ID NO:327), DOM9-112-191 (SEQ ID NO:328), DOM9-112-192 (SEQ ID NO:329), DOM9-112-193 (SEQ ID NO:330), DOM9-112-194 (SEQ ID NO:331), DOM9-112-195 (SEQ ID NO:332), DOM9-112-196 (SEQ ID NO:333), DOM9-112-197 (SEQ ID NO:334), DOM9-112-198 (SEQ ID NO:335), DOM9-112-199 (SEQ ID NO:336), DOM9-112-200 (SEQ ID NO:337), DOM9-112-201 (SEQ ID NO:338), DOM9-112-202 (SEQ ID NO:339), DOM9-120 (SEQ ID NO:340), DOM9-121 (SEQ ID NO:341), DOM9-122 (SEQ ID NO:342), DOM9-123 (SEQ ID NO:343), DOM9-124 (SEQ ID NO:344), DOM9-125 (SEQ ID NO:345), DOM9-128 (SEQ ID NO:346), DOM9-134 (SEQ ID NO:347), DOM9-136 (SEQ ID NO:348), DOM9-26 (SEQ ID NO:500), DOM9-35 (SEQ ID NO:501), DOM9-36 (SEQ ID NO:502), DOM9-37 (SEQ ID NO:503), DOM9-38 (SEQ ID NO:504), DOM9-39 (SEQ ID NO:505), DOM9-40 (SEQ ID NO:506), DOM9-41 (SEQ ID NO:507), DOM9-43 (SEQ ID NO:508), DOM9-44 (SEQ ID NO:509), DOM9-44-500 (SEQ ID NO:510), DOM9-44-501 (SEQ ID NO:511), DOM9-44-502 (SEQ ID NO:512), DOM9-44-503 (SEQ ID NO:513), DOM9-44-504 (SEQ ID NO:514), DOM9-44-505 (SEQ ID NO:515), DOM9-44-506 (SEQ ID NO:516), DOM9-44-507 (SEQ ID NO:517), DOM9-44-509 (SEQ ID NO:518), DOM9-44-510 (SEQ ID NO:519), DOM9-44-511 (SEQ ID NO:520), DOM9-44-512 (SEQ ID NO:521), DOM9-44-513 (SEQ ID NO:522), DOM9-44-514 (SEQ ID NO:523), DOM9-44-515 (SEQ ID NO:524), DOM9-44-516 (SEQ ID NO:525), DOM9-44-517 (SEQ ID NO:526), DOM9-44-518 (SEQ ID NO:527), DOM9-44-519 (SEQ ID NO:528), DOM9-44-520 (SEQ ID NO:529), DOM9-44-521 (SEQ ID NO:530), DOM9-44-522 (SEQ ID NO:531), DOM9-44-523 (SEQ ID NO:532), DOM9-44-524 (SEQ ID NO:533), DOM9-44-525 (SEQ ID NO:534), DOM9-44-526 (SEQ ID NO:535), DOM9-44-527 (SEQ ID NO:536), DOM9-44-528 (SEQ ID NO:537), DOM9-44-529 (SEQ ID NO:538), DOM9-44-530 (SEQ ID NO:539), DOM9-44-531 (SEQ ID NO:540), DOM9-44-532 (SEQ ID NO:541), DOM9-44-533 (SEQ ID NO:542), DOM9-44-534 (SEQ ID NO:543), DOM9-44-535 (SEQ ID NO:544), DOM9-44-536 (SEQ ID NO:545), DOM9-44-537 (SEQ ID NO:546), DOM9-44-538 (SEQ ID NO:547), DOM9-44-539 (SEQ ID NO:548), DOM9-44-540 (SEQ ID NO:549), DOM9-44-541 (SEQ ID NO:550), DOM9-44-542 (SEQ ID NO:551), DOM9-44-543 (SEQ ID NO:552), DOM9-44-544 (SEQ ID NO:553), DOM9-44-545 (SEQ ID NO:554), DOM9-44-546 (SEQ ID NO:555), DOM9-44-547 (SEQ ID NO:556), DOM9-44-548 (SEQ ID NO:557), DOM9-44-549 (SEQ ID NO:558), DOM9-44-550 (SEQ ID NO:559), DOM9-44-551 (SEQ ID NO:560), DOM9-44-552 (SEQ ID NO:561), DOM9-44-553 (SEQ ID NO:562), DOM9-44-554 (SEQ ID NO:563), DOM9-44-555 (SEQ ID NO:564), DOM9-44-556 (SEQ ID NO:565), DOM9-44-557 (SEQ ID NO:566), DOM9-44-558 (SEQ ID NO:567), DOM9-44-559 (SEQ ID NO:568), DOM9-44-560 (SEQ ID NO:569), DOM9-44-561 (SEQ ID NO:570), DOM9-44-562 (SEQ ID NO:571), DOM9-44-563 (SEQ ID NO:572), DOM9-44-564 (SEQ ID NO:573), DOM9-44-565 (SEQ ID NO:574), DOM9-44-566 (SEQ ID NO:575), DOM9-44-625 (SEQ ID NO:576), DOM9-44-626 (SEQ ID NO:577), DOM9-44-627 (SEQ ID NO:578), DOM9-44-628 (SEQ ID NO:579), DOM9-44-629 (SEQ ID NO:580), DOM9-44-630 (SEQ ID NO:581), DOM9-44-631 (SEQ ID NO:582), DOM9-44-632 (SEQ ID NO:583), DOM9-44-633 (SEQ ID NO:584), DOM9-44-634 (SEQ ID NO:585), DOM9-44-636 (SEQ ID NO:586), DOM9-44-637 (SEQ ID NO:587), DOM9-44-639 (SEQ ID NO:588), DOM9-44-640 (SEQ ID NO:589), DOM9-44-641(SEQ ID NO:590), DOM9-44-642 (SEQ ID NO:591), DOM9-44-643 (SEQ ID NO:592), DOM9-44-644 (SEQ ID NO:593), DOM9-45 (SEQ ID NO:594), DOM9-46 (SEQ ID NO:595), DOM9-47 (SEQ ID NO:596), DOM9-48 (SEQ ID NO:597), DOM9-143 (SEQ ID NO:598), DOM9-144 (SEQ ID NO:599), DOM9-146 (SEQ ID NO:600), DOM9-152 (SEQ ID NO:601), DOM9-155 (SEQ ID NO:602), DOM9-155-001 (SEQ ID NO:603), DOM9-155-3 (SEQ ID NO:604), DOM9-155-5 (SEQ ID NO:605), DOM9-155-8 (SEQ ID NO:606), DOM9-155-9 (SEQ ID NO:607), DOM9-155-11 (SEQ ID NO:608), DOM9-155-13 (SEQ ID NO:609), DOM9-155-14 (SEQ ID NO:610), DOM9-155-17 (SEQ ID NO:611), DOM9-155-19 (SEQ ID NO:612), DOM9-155-20 (SEQ ID NO:613), DOM9-155-22 (SEQ ID NO:614), DOM9-155-23 (SEQ ID NO:615), DOM9-155-24 (SEQ ID NO:616), DOM9-155-25 (SEQ ID NO:617), DOM9-155-26 (SEQ ID NO:618), DOM9-155-27 (SEQ ID NO:619), DOM9-155-28 (SEQ ID NO:620), DOM9-155-29 (SEQ ID NO:621), DOM9-155-30 (SEQ ID NO:622), DOM9-155-31 (SEQ ID NO:623), DOM9-155-32 (SEQ ID NO:624), DOM9-155-33 (SEQ ID NO:625), DOM9-155-34 (SEQ ID NO:626), DOM9-155-35 (SEQ ID NO:627), DOM9-155-36 (SEQ ID NO:628), DOM9-155-37 (SEQ ID NO:629), DOM9-155-38 (SEQ ID NO:630), DOM9-155-39 (SEQ ID NO:631), DOM9-155-41 (SEQ ID NO:632), DOM9-155-42 (SEQ ID NO:633), DOM9-155-43 (SEQ ID NO:634), DOM9-155-44 (SEQ ID NO:635), DOM9-155-45(SEQ ID NO:636), DOM9-155-46 (SEQ ID NO:637), DOM9-155-47 (SEQ ID NO:638), DOM9-155-48 (SEQ ID NO:639), DOM9-155-49 (SEQ ID NO:640), DOM9-155-50 (SEQ ID NO:641), DOM9-155-51 (SEQ ID NO:642), DOM9-155-52 (SEQ ID NO:643), DOM9-155-53 (SEQ ID NO:644), DOM9-158 (SEQ ID NO:645), DOM9-160 (SEQ ID NO:646), DOM9-161 (SEQ ID NO:647), DOM9-162 (SEQ ID NO:648), DOM9-163 (SEQ ID NO:649) and DOM9-164 (SEQ ID NO:650).

[0283] In some embodiments, the isolated and/or recombinant nucleic acid comprises a nucleotide sequence encoding a ligand that has binding specificity for IL-4, as described herein, wherein said ligand comprises an amino acid sequence that has at least about 80%, at least about 85%, at least about 90%, at least about 91%, at least about 92%, at least about 93%, at least about 94%, at least about 95%, at least about 96%, at least about 97%, at least about 98%, or at least about 99% amino acid sequence identity with the amino acid sequence of a dAb selected from the group consisting of DOM9-155-77 (SEQ ID NO:2426), DOM9-155-78 (SEQ ID NO:2427), DOM9-112-204 (SEQ ID NO:2428), DOM9-112-205 (SEQ ID NO:2429), DOM9-112-206 (SEQ ID NO:2430), DOM9-112-207 (SEQ ID NO:2431), DOM9-112-208 (SEQ ID NO:2432), DOM9-112-209 (SEQ ID NO:2433), DOM9-112-210 (SEQ ID NO:2434), DOM9-112-211 (SEQ ID NO:2435), DOM9-112-212 (SEQ ID NO:2436), DOM9-112-213 (SEQ ID NO:2437), DOM9-112-214 (SEQ ID NO:2438), DOM9-112-215 (SEQ ID NO:2439), DOM9-112-216 (SEQ ID NO:2440), DOM9-112-217 (SEQ ID NO:2441), DOM9-112-218 (SEQ ID NO:2442), DOM9-112-219 (SEQ ID NO:2443), DOM9-112-220 (SEQ ID NO:2444), DOM9-112-221 (SEQ ID NO:2445), DOM9-112-222 (SEQ ID NO:2446), DOM9-112-223 (SEQ ID NO:2447), DOM9-112-224 (SEQ ID NO:2448), DOM9-112-225 (SEQ ID NO:2449), DOM9-112-226 (SEQ ID NO:2450), DOM9-112-227 (SEQ ID NO:2451), DOM9-112-228 (SEQ ID NO:2452), DOM9-112-229 (SEQ ID NO:2453), DOM9-112-230 (SEQ ID NO:2454), DOM9-112-231 (SEQ ID NO:2455), DOM9-112-233 (SEQ ID NO:1734), DOM9-112-232 (SEQ ID NO:1733) and DOM9-112-234 (SEQ ID NO:1735).

[0284] In other embodiments, the isolated and/or recombinant nucleic acid comprises a nucleotide sequence encoding a ligand that has binding specificity for IL-13, as described herein, wherein said ligand comprises an amino acid sequence that has at least about 80%, at least about 85%, at least about 90%, at least about 91%, at least about 92%, at least about 93%, at least about 94%, at least about 95%, at least about 96%, at least about 97%, at least about 98%, or at least about 99% amino acid sequence identity with the amino acid sequence of a dAb selected from the group consisting of DOM10-53 (SEQ ID NO:967), DOM10-53-1 (SEQ ID NO:968), DOM10-53-2 (SEQ ID NO:969), DOM10-53-3 (SEQ ID NO:970), DOM10-53-4 (SEQ ID NO:971), DOM10-53-5 (SEQ ID NO:972), DOM10-53-6 (SEQ ID NO:973), DOM10-53-7 (SEQ ID NO:974), DOM10-53-8 (SEQ ID NO:975), DOM10-53-9 (SEQ ID NO:976), DOM10-53-10 (SEQ ID NO:977), DOM10-53-11 (SEQ ID NO:978), DOM10-53-12 (SEQ ID NO:979), DOM10-53-13 (SEQ ID NO:980), DOM10-53-14 (SEQ ID NO:981), DOM10-53-15 (SEQ ID NO:982), DOM10-53-16 (SEQ ID NO:983), DOM10-53-17 (SEQ ID NO:984), DOM10-53-18 (SEQ ID NO:985), DOM10-53-19 (SEQ ID NO:986), DOM10-53-20 (SEQ ID NO:987), DOM10-53-21 (SEQ ID NO:988), DOM10-53-122 (SEQ ID NO:989), DOM10-53-123 (SEQ ID NO:990), DOM10-53-24 (SEQ ID NO:991), DOM10-53-25 (SEQ ID NO:992), DOM10-53-26 (SEQ ID NO:993), DOM10-53-27 (SEQ ID NO:994), DOM10-53-28 (SEQ ID NO:995), DOM10-53-29 (SEQ ID NO:996), DOM10-53-30 (SEQ ID NO:997), DOM10-53-31 (SEQ ID NO:998), DOM10-53-32 (SEQ ID NO:1999), DOM10-53-43 (SEQ ID NO:1000), DOM10-53-44 (SEQ ID NO:1001), DOM10-53-45 (SEQ ID NO:1002), DOM10-53-46 (SEQ ID NO:1003), DOM10-53-47 (SEQ ID NO:1004), DOM10-53-48 (SEQ ID NO:1005), DOM10-53-49 (SEQ ID NO:1006), DOM10-53-50 (SEQ ID NO:1007), DOM10-53-51 (SEQ ID NO:1008), DOM10-53-52 (SEQ ID NO:1009), DOM10-53-53 (SEQ ID NO:1010), DOM10-53-54 (SEQ ID NO:1011), DOM10-53-55 (SEQ ID NO:1012), DOM10-53-56 (SEQ ID NO:1013), DOM10-53-57 (SEQ ID NO:1014), DOM10-53-59 (SEQ ID NO:1015), DOM10-53-60 (SEQ ID NO:1016), DOM10-53-61 (SEQ ID NO:1017), DOM10-53-62 (SEQ ID NO:1018), DOM10-53-63 (SEQ ID NO:1019), DOM10-53-64 (SEQ ID NO:1020), DOM10-53-65 (SEQ ID NO:1021), DOM10-53-66 (SEQ ID NO:1022), DOM10-53-67 (SEQ ID NO:1023), DOM10-53-68 (SEQ ID NO:1024), DOM10-53-69 (SEQ ID NO:1025), DOM10-53-70 (SEQ ID NO:1026), DOM10-53-71 (SEQ ID NO:1027), DOM10-53-72 (SEQ ID NO:1028), DOM10-53-73 (SEQ ID NO:1029), DOM10-53-74 (SEQ ID NO:1030), DOM10-53-75 (SEQ ID NO:1031), DOM10-53-76 (SEQ ID NO:1032), DOM10-53-77 (SEQ ID NO:1033), DOM10-53-78 (SEQ JD NO:1034), DOM10-53-79 (SEQ ID NO:1035), DOM10-53-80 (SEQ ID NO:1036), DOM10-53-81 (SEQ ID NO:1037), DOM10-53-82 (SEQ ID NO:1038), DOM10-53-83 (SEQ ID NO:1039), DOM10-53-84 (SEQ ID NO:1040), DOM10-53-85 (SEQ ID NO:1041), DOM10-53-86 (SEQ ID NO:1042), DOM10-53-87 (SEQ ID NO:1043), DOM10-53-88 (SEQ ID NO:1044), DOM10-53-89 (SEQ ID NO:1045), DOM10-53-91 (SEQ ID NO:1046), DOM10-53-92 (SEQ ID NO:1047), DOM10-53-93 (SEQ ID NO:1048), DOM10-53-94 (SEQ ID NO:1049), DOM10-53-95 (SEQ ID NO:1050), DOM10-53-96 (SEQ ID NO:1051), DOM10-53-97 (SEQ ID NO:1052), DOM10-53-98 (SEQ ID NO:1053), DOM10-53-99 (SEQ ID NO:1054), DOM10-53-100 (SEQ ID NO:1055), DOM10-53-103 (SEQ ID NO:1056), DOM10-53-105 (SEQ ID NO:1057), DOM10-53-106 (SEQ ID NO:1058), DOM10-53-108 (SEQ ID NO:1059), DOM10-53-110 (SEQ ID NO:1060), DOM10-53-111 (SEQ ID NO:1061), DOM10-53-112 (SEQ ID NO:10632), DOM10-53-114 (SEQ ID NO:1063), DOM10-53-115 (SEQ ID NO:1064), DOM10-53-116 (SEQ ID NO:1065), DOM10-53-117 (SEQ ID NO:1066), DOM10-53-119 (SEQ ID NO:1067), DOM10-53-120 (SEQ ID NO:1068), DOM10-53-122 (SEQ ID NO:1069), DOM10-53-201 (SEQ ID NO:1070), DOM10-53-203 (SEQ ID NO:1071), DOM10-53-204 (SEQ ID NO:1072), DOM10-53-205 (SEQ ID NO:1073), DOM10-53-206 (SEQ ID NO:1074), DOM10-53-207 (SEQ ID NO:1075), DOM10-53-208 (SEQ ID NO:1076), DOM10-53-209 (SEQ ID NO:1077), DOM10-53-210 (SEQ ID NO:1078), DOM10-53-211 (SEQ ID NO:1079), DOM10-53-213 (SEQ ID NO:1080), DOM10-53-214 (SEQ ID NO:1081), DOM10-53-215 (SEQ ID NO:1082), DOM10-53-216 (SEQ ID NO:1083), DOM10-53-217 (SEQ ID NO:1084), DOM10-53-1218 (SEQ ID NO:1085), DOM10-53-219 (SEQ ID NO:1086), DOM10-53-220 (SEQ ID NO:1087), DOM10-53-221 (SEQ ID NO:1088), DOM10-53-222 (SEQ ID NO:1089), DOM10-53-223 (SEQ ID NO:1090), DOM10-53-224 (SEQ ID NO:1091), DOM10-53-225 (SEQ ID NO:1092), DOM10-53-226 (SEQ ID NO:1093), DOM10-53-227 (SEQ ID NO:1094), DOM10-53-228 (SEQ ID NO:1095), DOM10-53-229 (SEQ ID NO:1096), DOM10-53-230 (SEQ ID NO:1097), DOM10-53-231 (SEQ ID NO:1098), DOM10-53-232 (SEQ ID NO:1099), DOM10-53-233 (SEQ ID NO:1100), DOM10-53-234 (SEQ ID NO:1101), DOM10-53-235 (SEQ ID NO:1102), DOM10-53-236 (SEQ ID NO:1103), DOM10-53-237 (SEQ ID NO:1104), DOM10-53-238 (SEQ ID NO:1105), DOM10-53-239 (SEQ ID NO:1106), DOM10-53-240 (SEQ ID NO:1107), DOM10-53-241 (SEQ ID NO:1108), DOM10-53-242 (SEQ ID NO:1109), DOM10-53-243 (SEQ ID NO:1110), DOM10-53-244 (SEQ ID NO:1111), DOM10-53-245 (SEQ ID NO:1112), DOM10-53-246 (SEQ ID NO:1113), DOM10-53-247 (SEQ ID NO:1114), DOM10-53-248 (SEQ ID NO:1115), DOM10-53-249 (SEQ ID NO:1116), DOM10-53-250 (SEQ ID NO:1117), DOM10-53-251 (SEQ ID NO:1118), DOM10-53-252 (SEQ ID NO:1119), DOM10-53-253 (SEQ ID NO:1120), DOM10-53-254 (SEQ ID NO:1121), DOM10-53-255 (SEQ ID NO:1122), DOM10-53-256 (SEQ ID NO:1123), DOM10-53-257 (SEQ ID NO:1124), DOM10-53-258 (SEQ ID NO:1125), DOM10-53-259 (SEQ ID NO:1126), DOM10-53-260 (SEQ ID NO:1127), DOM10-53-261 (SEQ ID NO:1128), DOM10-53-262 (SEQ ID NO:1129), DOM10-53-263 (SEQ ID NO:1130), DOM10-53-264 (SEQ ID NO:1131), DOM10-53-265 (SEQ ID NO:1132), DOM10-53-266 (SEQ ID NO:1133), DOM10-53-267 (SEQ ID NO:1134), DOM10-53-268 (SEQ ID NO:1135), DOM10-53-269 (SEQ ID NO:1136), DOM10-53-270 (SEQ ID NO:1137), DOM10-53-271 (SEQ ID NO:1138), DOM10-53-272 (SEQ ID NO:1139), DOM10-53-273 (SEQ ID NO:1140), DOM10-53-2′74 (SEQ ID NO:1141), DOM10-53-275 (SEQ ID NO:1142), DOM10-53-276 (SEQ ID NO:1143), DOM10-53-277 (SEQ ID NO:1144), DOM10-53-278 (SEQ ID NO:1145), DOM10-53-279 (SEQ ID NO:1146), DOM10-53-280 (SEQ ID NO:1147), DOM10-53-281 (SEQ ID NO:1148), DOM10-53-282 (SEQ ID NO:1149), DOM10-53-283 (SEQ ID NO:1150), DOM10-53-284 (SEQ ID NO:1151), DOM10-53-285 (SEQ ID NO:1152), DOM10-53-286 (SEQ ID NO:1153), DOM10-53-287 (SEQ ID NO:1154), DOM10-53-288 (SEQ ID NO:1155), DOM10-53-289 (SEQ ID NO:1156), DOM10-53-290 (SEQ ID NO:1157), DOM10-53-291 (SEQ ID NO:1158), DOM10-53-292 (SEQ ID NO:1159), DOM10-53-293 (SEQ ID NO:1160), DOM10-53-294 (SEQ ID NO:1161), DOM10-53-295 (SEQ ID NO:1162), DOM10-53-296 (SEQ ID NO:1163), DOM10-53-297 (SEQ ID NO:1164), DOM10-53-298 (SEQ ID NO:1165), DOM10-53-299 (SEQ ID NO:1166), DOM10-53-300 (SEQ ID NO:1167), DOM10-53-301 (SEQ ID NO:1168), DOM10-53-302 (SEQ ID NO:1169), DOM10-53-303 (SEQ ID NO:1170), DOM10-53-304 (SEQ ID NO:1171), DOM10-53-305 (SEQ ID NO:1172), DOM10-53-306 (SEQ ID NO:1173), DOM10-53-307 (SEQ ID NO:1174), DOM10-53-308 (SEQ ID NO:1175), DOM10-53-309 (SEQ ID NO:1176), DOM10-53-310 (SEQ ID NO:11787), DOM10-53-311 (SEQ ID NO:1178), DOM10-53-312 (SEQ ID NO:1179), DOM10-53-314 (SEQ ID NO:1180), DOM10-53-315 (SEQ ID NO:1181), DOM10-53-316 (SEQ ID NO:1182), DOM10-53-317 (SEQ ID NO:1183), DOM10-53-318 (SEQ ID NO:1184), DOM10-53-319 (SEQ ID NO:1185), DOM10-53-320 (SEQ ID NO:1186), DOM10-53-321 (SEQ ID NO:1187), DOM10-53-322 (SEQ ID NO:1188), DOM10-53-323 (SEQ ID NO:1189), DOM10-53-324 (SEQ ID NO:1190), DOM10-53-325 (SEQ ID NO:1191), DOM10-53-326 (SEQ ID NO:1192), DOM10-53-327 (SEQ ID NO:1193), DOM10-53-328 (SEQ ID NO:1194), DOM10-53-329 (SEQ ID NO:1195), DOM10-53-330 (SEQ ID NO:1196), DOM10-53-331 (SEQ ID NO:1197), DOM10-53-333 (SEQ ID NO:1198), DOM10-53-334 (SEQ ID NO:1199), DOM10-53-336 (SEQ ID NO:1200), DOM10-53-337 (SEQ ID NO:1201), DOM10-53-338 (SEQ ID NO:1202), DOM10-53-339 (SEQ ID NO:1203), DOM10-53-340 (SEQ ID NO:1204), DOM10-53-341 (SEQ ID NO:1205), DOM10-53-342 (SEQ ID NO:1206), DOM10-53-343 (SEQ ID NO:1207), DOM10-53-344 (SEQ ID NO:1208), DOM10-53-345 (SEQ ID NO:1209), DOM10-53-346 (SEQ ID NO:1210), DOM10-53-347 (SEQ ID NO:1211), DOM10-53-348 (SEQ ID NO:1212), DOM10-53-349 (SEQ ID NO:1213), DOM10-53-350 (SEQ ID NO:1214), DOM10-53-351 (SEQ ID NO:1215), DOM10-53-352 (SEQ ID NO:1216), DOM10-53-353 (SEQ ID NO:1217), DOM10-53-354 (SEQ ID NO:1218), DOM10-53-355 (SEQ ID NO: 1219), DOM10-53-356 (SEQ ID NO:1220), DOM10-53-357 (SEQ ID NO:1221), DOM10-53-358 (SEQ ID NO:1222), DOM10-53-359 (SEQ ID NO:1223), DOM10-53-360 (SEQ ID NO:1224), DOM10-53-361 (SEQ ID NO:1225), DOM10-53-362 (SEQ ID NO:1226), DOM10-53-363 (SEQ ID NO:1227), DOM10-53-364 (SEQ ID NO:1228), DOM10-53-365 (SEQ ID NO:1229), DOM10-53-366 (SEQ ID NO:1230), DOM10-53-367 (SEQ ID NO:1231), DOM10-53-368 (SEQ ID NO:1232), DOM10-53-369 (SEQ ID NO:1233), DOM10-53-370 (SEQ ID NO:1234), DOM10-53-371 (SEQ ID NO:1235), DOM10-53-372 (SEQ ID NO:1236), DOM10-53-373 (SEQ ID NO:1237), DOM10-53-374 (SEQ ID NO:1238), DOM10-53-375 (SEQ ID NO:1239), DOM10-53-376 (SEQ ID NO:1240), DOM10-63-377 (SEQ ID NO:1241), DOM10-53-378 (SEQ ID NO:1242), DOM10-53-379 (SEQ ID NO:1243), DOM10-53-380 (SEQ ID NO:1244), DOM10-53-381 (SEQ ID NO:1245), DOM10-53-382 (SEQ ID NO:1246), DOM10-53-383 (SEQ ID NO:1247), DOM10-53-384 (SEQ ID NO:1248), DOM10-53-385 (SEQ ID NO:1249), DOM10-53-386 (SEQ ID NO:1250), DOM10-53-387 (SEQ ID NO:1251), DOM10-53-388 (SEQ ID NO:1252), DOM10-53-389 (SEQ ID NO:1253), DOM10-53-390 (SEQ ID NO:1254), DOM10-53-391 (SEQ ID NO:1255), DOM10-53-392 (SEQ ID NO:1256), DOM10-53-393 (SEQ ID NO:1257), DOM10-53-394 (SEQ ID NO:1258), DOM10-53-395 (SEQ ID NO:1259), DOM10-53-396 (SEQ ID NO:1260), DOM10-53-400 (SEQ ID NO:1261), DOM10-53-401 (SEQ ID NO:1262), DOM10-53-402 (SEQ ID NO:1263), DOM10-53-403 (SEQ ID NO:1264), DOM10-53-404 (SEQ ID NO:1265), DOM10-53-405 (SEQ ID NO:1266), DOM10-53-406 (SEQ ID NO:1267), DOM10-53-407 (SEQ ID NO:1268), DOM10-53-408 (SEQ ID NO:1269), DOM10-53-409 (SEQ ID NO:1270), DOM10-53-410 (SEQ ID NO:1271), DOM10-53-411 (SEQ ID NO:1272), DOM10-53-412 (SEQ ID NO:1273), DOM10-53-413 (SEQ ID NO:1274), DOM10-53-414 (SEQ ID NO:1275), DOM10-53-415 (SEQ ID NO:1276), DOM10-53-416 (SEQ ID NO:1277), DOM10-53-417 (SEQ ID NO:1278), DOM10-53-418 (SEQ ID NO:1279), DOM10-53-419 (SEQ ID NO:1280), DOM10-53-420 (SEQ ID NO:1281), DOM10-53-421 (SEQ ID NO:1282), DOM10-168 (SEQ ID NO:1508), DOM10-169 (SEQ ID NO:1509), DOM10-176 (SEQ ID NO:1510), DOM10-176-1 (SEQ ID NO:1511), DOM10-176-2 (SEQ ID NO:1512), DOM10-173 (SEQ ID NO:1513), DOM10-176-4 (SEQ ID NO:1514), DOM10-176-5 (SEQ ID NO:1515), DOM10-176-6 (SEQ ID NO:1516), DOM10-176-23 (SEQ ID NO:1517), DOM10-176-24 (SEQ ID NO:1518), DOM10-176-25 (SEQ ID NO:1519), DOM10-176-26 (SEQ ID NO:1520), DOM10-176-27 (SEQ ID NO:1521), DOM10-176-28 (SEQ ID NO:1522), DOM10-176-29 (SEQ ID NO:1523), DOM10-176-30 (SEQ ID NO:1524), DOM10-176-31 (SEQ ID NO:1525), DOM10-176-32 (SEQ ID NO:1526), DOM10-176-33 (SEQ ID NO:1527), DOM10-176-34 (SEQ ID NO:1528), DOM10-176-35 (SEQ ID NO:1529), DOM10-176-36 (SEQ ID NO:1530), DOM10-176-37 (SEQ ID NO:1531), DOM10-176-38 (SEQ ID NO:1532), DOM10-176-39 (SEQ ID NO:1533), DOM10-176-40 (SEQ ID NO:1534), DOM10-176-101 (SEQ ID NO:1535), DOM10-176-102 (SEQ ID NO:1536), DOM10-176-103 (SEQ ID NO:1537), DOM10-176-104 (SEQ ID NO:1538), DOM10-176-105 (SEQ ID NO:1539), DOM10-176-106 (SEQ ID NO:1540), DOM10-176-107 (SEQ ID NO:1541), DOM10-176-108 (SEQ ID NO:1542), DOM10-176-109 (SEQ ID NO:1543), DOM10-176-110 (SEQ ID NO:1544), DOM10-176-111 (SEQ ID NO:1545), DOM10-176-112 (SEQ ID NO:1546), DOM10-176-113 (SEQ ID NO:1547), DOM10-176-114 (SEQ ID NO:1548), DOM10-176-115 (SEQ ID NO:1549), DOM10-176-116 (SEQ ID NO:1550), DOM10-176-117 (SEQ ID NO:1551), DOM10-176-500 (SEQ ID NO:1552), DOM10-176-501 (SEQ ID NO:1553), DOM10-176-502 (SEQ ID NO:1554), DOM10-176-503 (SEQ ID NO:1555), DOM10-176-504 (SEQ ID NO:1556), DOM10-176-505 (SEQ ID NO:1557), DOM10-176-506 (SEQ ID NO:1558), DOM10-176-507 (SEQ ID NO:1559), DOM10-176-508 (SEQ ID NO:1560), DOM10-176-509 (SEQ ID NO:1561), DOM10-176-510 (SEQ ID NO:1562), DOM10-176-511 (SEQ ID NO:1563), DOM10-176-512 (SEQ ID NO:1564), DOM10-176-513 (SEQ ID NO:1565), DOM10-176-514 (SEQ ID NO:1566), DOM10-176-515 (SEQ ID NO:1567), DOM10-176-516 (SEQ ID NO:1568), DOM10-176-517 (SEQ ID NO:1569), DOM10-176-518 (SEQ ID NO:1570), DOM10-176-519 (SEQ ID NO:1571), DOM10-176-520 (SEQ ID NO:1572), DOM10-176-521 (SEQ ID NO:1573), DOM10-176-522 (SEQ ID NO:1574), DOM10-176-523 (SEQ ID NO:1575), DOM10-176-524 (SEQ ID NO:1576), DOM10-176-525 (SEQ ID NO:1577), DOM10-176-526 (SEQ ID NO:1578), DOM10-176-527 (SEQ ID NO:1579), DOM10-176-528 (SEQ ID NO:1580), DOM10-176-529 (SEQ ID NO:1581), DOM10-176-530 (SEQ ID NO:1582), DOM10-176-531 (SEQ ID NO:1583), DOM10-176-532 (SEQ ID NO:1584), DOM10-176-533 (SEQ ID NO:1585), DOM10-176-534 (SEQ ID NO:1586), DOM10-176-535 (SEQ ID NO:1587), DOM10-176-536 (SEQ ID NO:1588), DOM10-176-537 (SEQ ID NO:1589), DOM10-176-538 (SEQ ID NO:1590), DOM10-176-539 (SEQ ID NO:1591), DOM10-176-540 (SEQ ID NO:1592), DOM10-176-541 (SEQ ID NO:1593), DOM10-176-542 (SEQ ID NO:1594), DOM10-176-543 (SEQ ID NO:1595), DOM10-176-544 (SEQ ID NO:1596), DOM10-176-545 (SEQ ID NO:1597), DOM10-176-546 (SEQ ID NO:1598), DOM10-176-547 (SEQ ID NO:1599), DOM10-176-548 (SEQ ID NO:1600), DOM10-176-549 (SEQ ID NO:1601), DOM10-176-550 (SEQ ID NO:1602), DOM10-176-551 (SEQ ID NO:1603), DOM10-176-552 (SEQ ID NO:1604), DOM10-176-553 (SEQ ID NO:1605), DOM10-176-554 (SEQ ID NO:1606), DOM10-176-555 (SEQ ID NO:1607), DOM10-176-556 (SEQ ID NO:1608), DOM10-176-557 (SEQ ID NO:1609), DOM10-176-558 (SEQ ID NO:1610), DOM10-176-559 (SEQ ID NO:1611), DOM10-176-560 (SEQ ID NO:1612), DOM10-176-561 (SEQ ID NO:1613), DOM10-176-562 (SEQ ID NO:1614), DOM10-176-563 (SEQ ID NO:1615), DOM10-176-564 (SEQ ID NO:1616), DOM10-176-565 (SEQ ID NO:1617), DOM10-176-566 (SEQ ID NO:1618), DOM10-176-567 (SEQ ID NO:1619), DOM10-176-568 (SEQ ID NO:1620), DOM10-176-569 (SEQ ID NO:1621), DOM10-176-570 (SEQ ID NO:1622), DOM10-176-571 (SEQ ID NO:1623), DOM10-176-572 (SEQ ID NO:1624), DOM10-176-573 (SEQ ID NO:1625), DOM10-176-574 (SEQ ID NO:1626), DOM10-176-575 (SEQ ID NO:1627), DOM10-176-576 (SEQ ID NO:1628), DOM10-176-577 (SEQ ID NO:1629), DOM10-176-578 (SEQ ID NO:1630), DOM10-176-579 (SEQ ID NO:1631), DOM10-176-580 (SEQ ID NO:1632), DOM10-176-581 (SEQ ID NO:1633), DOM10-176-582 (SEQ ID NO:1634), DOM10-176-583 (SEQ ID NO:1635), DOM10-176-584 (SEQ ID NO:1636), DOM10-176-585 (SEQ ID NO:1637), DOM10-176-586 (SEQ ID NO:1638), DOM10-176-587 (SEQ ID NO:1639), DOM10-176-588 (SEQ ID NO:1640), DOM10-176-589 (SEQ ID NO:1641), DOM10-176-590 (SEQ ID NO:1642), DOM10-176-591 (SEQ ID NO:1643), DOM10-176-592 (SEQ ID NO:1644), DOM10-176-593 (SEQ ID NO:1645), DOM10-176-594 (SEQ ID NO:1646), DOM10-176-595 (SEQ ID NO:1647), DOM10-176-596 (SEQ ID NO:1648), DOM10-176-597 (SEQ ID NO:1649), DOM10-176-598 (SEQ ID NO:1650), DOM10-176-599 (SEQ ID NO:1651), DOM10-176-600 (SEQ ID NO:1652), DOM10-176-601 (SEQ ID NO:1653), DOM10-176-602 (SEQ ID NO:1654), DOM10-176-603 (SEQ ID NO:1655), DOM10-176-604 (SEQ ID NO:1656), DOM10-176-605 (SEQ ID NO:1657), DOM10-176-606 (SEQ ID NO:1658), DOM10-176-607 (SEQ ID NO:1659), DOM10-176-608 (SEQ ID NO:1660), DOM10-176-609 (SEQ ID NO:1661), DOM10-176-610 (SEQ ID NO:1662), DOM10-176-611 (SEQ ID NO:1663), DOM10-176-612 (SEQ ID NO:1664), DOM10-176-613 (SEQ ID NO:1665), DOM10-176-614 (SEQ ID NO:1666), DOM10-176-615 (SEQ ID NO:1667), DOM10-176-616 (SEQ ID NO:1668), DOM10-176-617 (SEQ ID NO:1669), DOM10-176-618 (SEQ ID NO:1670), DOM10-176-619 (SEQ ID NO:1671), DOM10-176-620 (SEQ ID NO:1672), DOM10-176-621 (SEQ ID NO:1673), DOM10-176-622 (SEQ ID NO:1674), DOM10-176-623 (SEQ ID NO:1675), DOM10-176-624 (SEQ ID NO:1676), DOM10-176-625 (SEQ ID NO:1677), DOM10-176-626 (SEQ ID NO:1678), DOM10-176-627 (SEQ ID NO:1679), DOM10-176-628 (SEQ ID NO:1680), DOM10-176-629 (SEQ ID NO:1681), DOM10-176-630 (SEQ ID NO:1682), DOM10-176-631 (SEQ ID NO:1683), DOM10-176-632 (SEQ ID NO:1684), DOM10-176-633 (SEQ ID NO:1685), DOM10-176-634 (SEQ ID NO:1686), DOM10-176-635 (SEQ ID NO:1687), DOM10-176-636 (SEQ ID NO:1688), DOM10-176-637 (SEQ ID NO:1689), DOM10-176-638 (SEQ ID NO:1690), DOM10-176-639 (SEQ ID NO:1691), DOM10-176-640 (SEQ ID NO:1692), DOM10-176-641 (SEQ ID NO:1693), DOM10-176-643 (SEQ ID NO:1694), DOM10-176-644 (SEQ ID NO:1695), DOM10-176-645 (SEQ ID NO:1696), DOM10-176-646 (SEQ ID NO:1697), DOM10-176-647 (SEQ ID NO:1698), DOM10-176-648 (SEQ ID NO:1699), DOM10-176-649 (SEQ ID NO:1700), DOM10-176-650 (SEQ ID NO:1701), DOM10-176-651 (SEQ ID NO:1702), DOM10-176-652 (SEQ ID NO:1703), DOM10-176-653 (SEQ ID NO:1704), DOM10-176-654 (SEQ ID NO:1705), DOM10-176-655 (SEQ ID NO:1706), DOM10-176-656 (SEQ ID NO:1707), DOM10-176-657 (SEQ ID NO:1708), DOM10-176-658 (SEQ ID NO:1709), DOM10-176-659 (SEQ ID NO:1710), DOM10-176-660 (SEQ ID NO:1711), DOM10-176-661 (SEQ ID NO:1712), DOM10-176-662 (SEQ ID NO:1713), DOM10-176-663 (SEQ ID NO:1714), DOM10-176-664 (SEQ ID NO:1715), DOM10-176-665 (SEQ ID NO:1716), DOM10-176-666 (SEQ ID NO:1717), DOM10-176-667 (SEQ ID NO:1718), DOM10-176-668 (SEQ ID NO:1719), DOM10-176-669 (SEQ ID NO:1720), DOM10-176-670 (SEQ ID NO:1721), DOM10-176-671 (SEQ ID NO:1722), DOM10-176-672 (SEQ ID NO:1723), DOM10-176-673 (SEQ ID NO:1724), DOM10-176-674 (SEQ ID NO:1725), DOM10-176-675 (SEQ ID NO:1726), DOM10-253 (SEQ ID NO:1727), DOM10-255 (SEQ ID NO:1728), DOM10-272 (SEQ ID NO:1729), DOM10-307 (SEQ ID NO:1730), DOM10-319 (SEQ ID NO:1731) and DOM10-319-1 (SEQ ID NO:1732.

[0285] In other embodiments, the isolated and/or recombinant nucleic acid comprises a nucleotide sequence encoding a ligand that has binding specificity for IL-13, as described herein, wherein said ligand comprises an amino acid sequence that has at least about 80%, at least about 85%, at least about 90%, at least about 91%, at least about 92%, at least about 93%, at least about 94%, at least about 95%, at least about 96%, at least about 97%, at least about 98%, or at least about 99% amino acid sequence identity with the amino acid sequence of a dAb selected from the group consisting of DOM10-236 (SEQ ID NO:2129), DOM10-238 (SEQ ID NO:2130), DOM10-241 (SEQ ID NO:2131), DOM10-245 (SEQ ID NO:2132), DOM10-249 (SEQ ID NO:2133), DOM10-250 (SEQ ID NO:2134), DOM10-251 (SEQ ID NO:2135), DOM10-254 (SEQ ID NO:2136), DOM10-256 (SEQ ID NO:2137), DOM10-259 (SEQ ID NO:2138), DOM10-260 (SEQ ID NO:2139), DOM10-261 (SEQ ID NO:2140), DOM10-263 (SEQ ID NO:2141), DOM10-264 (SEQ ID NO:2142), DOM10-273 (SEQ ID NO:2143), DOM10-278 (SEQ ID NO:2144), DOM10-279 (SEQ ID NO:2145), DOM10-281 (SEQ ID NO:2146), DOM10-282 (SEQ ID NO:2147), DOM10-283 (SEQ ID NO:2148), DOM10-400 (SEQ ID NO:2149), DOM10-401 (SEQ ID NO:2150), DOM10-402 (SEQ ID NO:2151), DOM10-404 (SEQ ID NO:2152), DOM10-406 (SEQ ID NO:2153), DOM10-407 (SEQ ID NO:2154), DOM10-409 (SEQ ID NO:2155), DOM10-410 (SEQ ID NO:2156), DOM10-414 (SEQ ID NO:2157), DOM10-415 (SEQ ID NO:2158), DOM10-416 (SEQ ID NO:2159), DOM10-418 (SEQ ID NO:2160), DOM10-420 (SEQ ID NO:2161), DOM10-422 (SEQ ID NO:2162), DOM10-423 (SEQ ID NO:2163), DOM10-424 (SEQ ID NO:2164), DOM10-425 (SEQ ID NO:2165), DOM10-426 (SEQ ID NO:2166), DOM10-427 (SEQ ID NO:2167), DOM10-428 (SEQ ID NO:2168), DOM10-429 (SEQ ID NO:2169), DOM10-430 (SEQ ID NO:2170), DOM10-431 (SEQ ID NO:2171), DOM10-432 (SEQ ID NO:2172), DOM10-433 (SEQ ID NO:2173), DOM10-467 (SEQ ID NO:2174), DOM10-468 (SEQ ID NO:2175), DOM10-469 (SEQ ID NO:2176), DOM10-470 (SEQ ID NO:2177), DOM10-234 (SEQ ID NO:2178), DOM10-235 (SEQ ID NO:2179), DOM10-237 (SEQ ID NO:2180), DOM10-239 (SEQ ID NO:2181), DOM10-240 (SEQ ID NO:2182), DOM10-242 (SEQ ID NO:2183), DOM10-243 (SEQ ID NO:2184), DOM10-244 (SEQ ID NO:2185), DOM10-246 (SEQ ID NO:2186), DOM10-247 (SEQ ID NO:2187), DOM10-248 (SEQ ID NO:2188), DOM10-252 (SEQ ID NO:2189), DOM10-257 (SEQ ID NO:2190), DOM10-258 (SEQ ID NO:2191), DOM10-262 (SEQ ID NO:2192), DOM10-265 (SEQ ID NO:2193), DOM10-266 (SEQ ID NO:2194), DOM10-274 (SEQ ID NO:2195), DOM10-275 (SEQ ID NO:2196), DOM10-276 (SEQ ID NO:2197), DOM10-277 (SEQ ID NO:2198), DOM10-280 (SEQ ID NO:2199), DOM10-403 (SEQ ID NO:2200), DOM10-405 (SEQ ID NO:2201), DOM10-408 (SEQ ID NO:2202), DOM10-411 (SEQ ID NO:2203), DOM10-412 (SEQ ID NO:2204), DOM10-413 (SEQ ID NO:2205), DOM10-417 (SEQ ID NO:2206), DOM10-419 (SEQ ID NO:2207), DOM10-472 (SEQ ID NO:2208), DOM10-203 (SEQ ID NO:2209), DOM10-205 (SEQ ID NO:2210), DOM10-208 (SEQ ID NO:2211), DOM10-218 (SEQ ID NO:2212), DOM10-219 (SEQ ID NO:2213), DOM10-220 (SEQ ID NO:2214), DOM10-225 (SEQ ID NO:2215), DOM10-228 (SEQ ID NO:2216), DOM10-229 (SEQ ID NO:2217), DOM10-230 (SEQ ID NO:2218), DOM10-231 (SEQ ID NO:2219), DOM10-268 (SEQ ID NO:2220), DOM10-201 (SEQ ID NO:2221), DOM10-202 (SEQ ID NO:2222), DOM10-204 (SEQ ID NO:2223), DOM10-206 (SEQ ID NO:2224), DOM10-207 (SEQ ID NO:2225), DOM10-209 (SEQ ID NO:2226), DOM10-210 (SEQ ID NO:2227), DOM10-211 (SEQ ID NO:2228), DOM10-213 (SEQ ID NO:2229), DOM10-214 (SEQ ID NO:2230), DOM10-215 (SEQ ID NO:2231), DOM10-216 (SEQ ID NO:2232), DOM10-217 (SEQ ID NO:2233), DOM10-221 (SEQ ID NO:2234), DOM10-223 (SEQ ID NO:2235), DOM10-224 (SEQ ID NO:2236), DOM10-227 (SEQ ID NO:2237), DOM10-232 (SEQ ID NO:2238), DOM10-267 (SEQ ID NO:2239), DOM10-270 (SEQ ID NO:2240), DOM10-275-1 (SEQ ID NO:2241), DOM10-276-2 (SEQ ID NO:2242), DOM10-276-3 (SEQ ID NO:2243), DOM10-275-3 (SEQ ID NO:2244), DOM10-277-2 (SEQ ID NO:2245), DOM10-277-3 (SEQ ID NO:2246), DOM10-273-1 (SEQ ID NO:2247), DOM10-273-2 (SEQ ID NO:2248), DOM10-275-2 (SEQ ID NO:2249), DOM10-275-4 (SEQ ID NO:2250), DOM10-276-1 (SEQ ID NO:2251), DOM10-276-4 (SEQ ID NO:2252), DOM10-277-1 (SEQ ID NO:2253), DOM10-275-13 (SEQ ID NO:2254), DOM10-275-15 (SEQ ID NO:2255), DOM10-275-20 (SEQ ID NO:2256), DOM10-275-8 (SEQ ID NO:2257), DOM10-276-13 (SEQ ID NO:2258), DOM10-276-14 (SEQ ID NO:2259), DOM10-276-15 (SEQ ID NO:2260), DOM10-276-17 (SEQ ID NO:2261), DOM10-276-7 (SEQ ID NO:2262), DOM10-276-8 (SEQ ID NO:2263), DOM10-275-11 (SEQ ID NO:2264), DOM10-275-12 (SEQ ID NO:2265), DOM10-275-14 (SEQ ID NO:2266), DOM10-275-16 (SEQ ID NO:2267), DOM10-275-17 (SEQ ID NO:2268), DOM10-275-5 (SEQ ID NO:2269), DOM10-275-6 (SEQ ID NO:2270), DOM10-275-7 (SEQ ID NO:2271), DOM10-275-9 (SEQ ID NO:2272), DOM10-276-10 (SEQ ID NO:2273), DOM10-276-11 (SEQ ID NO:2274), DOM10-276-12 (SEQ ID NO:2275), DOM10-276-16 (SEQ ID NO:2276), DOM10-276-5 (SEQ ID NO:2277), DOM10-276-6 (SEQ ID NO:2278), DOM10-276-9 (SEQ ID NO:2279), DOM10-212 (SEQ ID NO:2280), DOM10-53-424 (SEQ ID NO:2281), DOM10-53-425 (SEQ ID NO:2282), DOM10-53-426 (SEQ ID NO:2283), DOM10-53-422 (SEQ ID NO:2284), DOM10-53-423 (SEQ ID NO:2285), DOM10-53-613 (SEQ ID NO:2286), DOM10-53-517 (SEQ ID NO:2287), DOM10-53-519 (SEQ ID NO:2288), DOM10-53-520 (SEQ ID NO:2289), DOM10-53-521 (SEQ ID NO:2290), DOM10-53-522 (SEQ ID NO:2291), DOM10-53-526 (SEQ ID NO:2292), DOM10-53-527 (SEQ ID NO:2293), DOM10-53-528 (SEQ ID NO:2294), DOM10-53-518 (SEQ ID NO:2295), DOM10-53-523 (SEQ ID NO:2296), DOM10-53-524 (SEQ ID NO:2297), DOM10-53-525 (SEQ ID NO:2298), DOM10-53-601 (SEQ ID NO:2299), DOM10-53-602 (SEQ ID NO:2300), DOM10-53-605 (SEQ ID NO:2301), DOM10-53-606 (SEQ ID NO:2302), DOM10-53-607 (SEQ ID NO:2303), DOM10-53-608 (SEQ ID NO:2304), DOM10-53-609 (SEQ ID NO:2305), DOM10-53-610 (SEQ ID NO:2306), DOM10-53-611 (SEQ ID NO:2307), DOM10-53-612 (SEQ ID NO:2308), DOM10-53-603 (SEQ ID NO:2309), DOM10-53-604 (SEQ ID NO:2310), DOM10-53-429 (SEQ ID NO:2311), DOM10-53-432 (SEQ ID NO:2312), DOM10-53-433 (SEQ ID NO:2313), DOM10-53-435 (SEQ ID NO:2314), DOM10-53-430 (SEQ ID NO:2315), DOM10-53-431 (SEQ ID NO:2316), DOM10-53-434 (SEQ ID NO:2317), DOM10-53-436 (SEQ ID NO:2318), DOM10-53-437 (SEQ ID NO:2319), DOM10-53-438 (SEQ ID NO:2320), DOM10-53-440 (SEQ ID NO:2321), DOM10-53-439 (SEQ ID NO:2322), DOM10-53-441 (SEQ ID NO:2323), DOM10-53-442 (SEQ ID NO:2324), DOM11-53-443 (SEQ ID NO:2325), DOM10-53-444 (SEQ ID NO:2326), DOM10-53-445 (SEQ ID NO:2327), DOM10-53-446 (SEQ ID NO:2328), DOM10-53-447 (SEQ ID NO:2329), DOM10-53-449 (SEQ ID NO:2330), DOM10-53-448 (SEQ ID NO:2331), DOM10-53-450 (SEQ ID NO:2332), DOM10-53-451 (SEQ ID NO:2333), DOM10-53-452 (SEQ ID NO:2334), DOM10-53-453 (SEQ ID NO:2335), DOM10-53-454 (SEQ ID NO:2336), DOM10-53-455 (SEQ ID NO:2337), DOM10-53-456 (SEQ ID NO:2338), DOM10-53-457 (SEQ ID NO:2339), DOM10-53-458 (SEQ ID NO:2340), DOM10-53-459 (SEQ ID NO:2341), DOM10-53-461 (SEQ ID NO:2342), DOM10-53-462 (SEQ ID NO:2343), DOM10-53-465 (SEQ ID NO:2344), DOM10-53-466 (SEQ ID NO:2345), DOM10-53-467 (SEQ ID NO:2346), DOM10-53-468 (SEQ ID NO:2347), DOM10-53-460 (SEQ ID NO:2348), DOM10-53-463 (SEQ ID NO:2349), DOM10-53-464 (SEQ ID NO:2350), DOM10-53-469 (SEQ ID NO:2351), DOM10-53-471 (SEQ ID NO:2352), DOM10-53-470 (SEQ ID NO:2353), DOM10-53-533 (SEQ ID NO:2354), DOM10-53-534 (SEQ ID NO:2355), DOM10-53-535 (SEQ ID NO:2356), DOM10-53-537 (SEQ ID NO:2357), DOM10-53-538 (SEQ ID NO:2358), DOM10-53-539 (SEQ ID NO:2359), DOM10-53-540 (SEQ ID NO:2360), DOM10-53-531 (SEQ ID NO:2361), DOM10-53-532 (SEQ ID NO:2362), DOM10-53-536 (SEQ ID NO:2363), DOM10-53-542 (SEQ ID NO:2364), DOM10-53-541 (SEQ ID NO:2365), DOM10-53-473 (SEQ ID NO:2366), DOM10-53-472 (SEQ ID NO:2367), DOM10-53-475 (SEQ ID NO:2368), DOM10-53-474 (SEQ ID NO:2369), DOM10-53-543 (SEQ ID NO:2370), DOM10-53-544 (SEQ ID NO: 2371), DOM10-53-545 (SEQ ID NO:2372), DOM10-53-548 (SEQ ID NO:2373), DOM10-53-546 (SEQ ID NO:2374), DOM10-53-549 (SEQ ID NO:2375), DOM10-53-547 (SEQ ID NO:2376), DOM10-53-550 (SEQ ID NO:2377), DOM10-53-551 (SEQ ID NO:2378), DOM10-53-560 (SEQ ID NO:2379), DOM10-53-565 (SEQ ID NO:2380), DOM10-53-559 (SEQ ID NO:2381), DOM10-53-561 (SEQ ID NO:2382), DOM10-53-562 (SEQ ID NO:2383), DOM10-53-563 (SEQ ID NO:2384), DOM10-53-564 (SEQ ID NO:2385), DOM10-53-566 (SEQ ID NO:2386), DOM10-53-554 (SEQ ID NO:2387), DOM10-53-552 (SEQ ID NO:2388), DOM10-53-553 (SEQ ID NO:2389), DOM10-53-558 (SEQ ID NO:2390), DOM10-53-556 (SEQ ID NO:2391) and DOM10-53-557 (SEQ ID NO:2392).

[0286] In other embodiments, the isolated and/or recombinant nucleic acid encoding a ligand that has binding specificity for IL-4, as described herein, wherein said nucleic acid comprises a nucleotide sequence that has at least about 80%, at least about 85%, at least about 90%, at least about 91%, at least about 92%, at least about 93%, at least about 94%, at least about 95%, at least about 96%, at least about 97%, at least about 98%, or at least about 99% nucleotide sequence identity with a nucleotide sequence encoding an anti-IL-4 drib selected from the group consisting of DOM9-15 (SEQ ID NO:1), DOM9-17 (SEQ ID NO:2), DOM9-23 (SEQ ID NO:3), DOM9-24 (SEQ ID NO:4), DOM9-25 (SEQ ID NO:5), DOM9-27 (SEQ ID NO:6), DOM9-28 (SEQ ID NO:7), DOM9-29 (SEQ ID NO:8), DOM9-30 (SEQ ID NO:9), DOM9-31 (SEQ ID NO:10), DOM9-32 (SEQ ID NO:11), DOM9-33 (SEQ ID NO:12), DOM9-50 (SEQ ID NO:13), DOM9-57 (SEQ ID NO:14), DOM9-59 (SEQ ID NO:15), DOM9-63 (SEQ ID NO:16), DOM9-67 (SEQ ID NO:17), DOM9-68 (SEQ ID NO:18), DOM9-70 (SEQ ID NO:19), DOM9-79 (SEQ ID NO:20), DOM9-82 (SEQ ID NO:21), DOM9-86 (SEQ ID NO:22), DOM9-94 (SEQ ID NO:23), DOM9-108 (SEQ ID NO:24), DOM9-112 (SEQ ID NO:25), DOM9-112-1 (SEQ ID NO:26), DOM9-112-2 (SEQ ID NO:27), DOM9-112-3 (SEQ ID NO:28), DOM9-112-4 (SEQ ID NO:29), DOM9-112-5 (SEQ ID NO:30), DOM9-112-6 (SEQ ID NO:31), DOM9-112-7 (SEQ ID NO:32), DOM9-112-8 (SEQ ID NO:33), DOM9-112-9 (SEQ ID NO:34), DOM9-112-10 (SEQ ID NO:35), DOM9-112-11 (SEQ ID NO:36), DOM9-112-12 (SEQ ID NO:37), DOM9-112-13 (SEQ ID NO:38), DOM9-112-14 (SEQ ID NO:39), DOM9-112-15 (SEQ ID NO:40), DOM9-112-16 (SEQ ID NO:41), DOM9-112-17 (SEQ ID NO:42), DOM9-112-18 (SEQ ID NO:43), DOM9-112-19 (SEQ ID NO:44), DOM9-112-20 (SEQ ID NO:45), DOM9-112-21 (SEQ ID NO:46), DOM9-112-22 (SEQ ID NO:47), DOM9-112-23 (SEQ ID NO:48), DOM9-112-25 (SEQ ID NO:49), DOM9-112-81 (SEQ ID NO:50), DOM9-112-82 (SEQ ID NO:51), DOM9-112-83 (SEQ ID NO:52), DOM9-112-84 (SEQ ID NO:53), DOM9-112-85 (SEQ ID NO:54), DOM9-112-86 (SEQ ID NO:55), DOM9-112-87 (SEQ ID NO:56), DOM9-112-88 (SEQ ID NO:57), DOM9-112-89 (SEQ ID NO:58), DOM9-112-90 (SEQ ID NO:59), DOM9-112-91 (SEQ ID NO:60), DOM9-112-92 (SEQ ID NO:61), DOM9-112-93 (SEQ ID NO:62), DOM9-112-94 (SEQ ID NO:63), DOM9-112-95 (SEQ ID NO:64), DOM9-112-96 (SEQ ID NO:65), DOM9-112-97 (SEQ ID NO:66), DOM9-112-98 (SEQ ID NO:67), DOM9-112-99 (SEQ ID NO:68), DOM9-112-100 (SEQ ID NO:69), DOM9-112-101 (SEQ ID NO:70), DOM9-112-102 (SEQ ID NO:71), DOM9-112-103 (SEQ ID NO:72), DOM9-112-104 (SEQ ID NO:73), DOM9-112-105 (SEQ ID NO:74), DOM9-112-106 (SEQ ID NO:75), DOM9-112-107 (SEQ ID NO:76), DOM9-112-108 (SEQ ID NO:77), DOM9-112-109 (SEQ ID NO:78), DOM9-112-110 (SEQ ID NO:79), DOM9-112-111 (SEQ ID NO:80), DOM9-112-112 (SEQ ID NO:81), DOM9-112-113 (SEQ ID NO:82), DOM9-112-114 (SEQ ID NO:83), DOM9-112-115 (SEQ ID NO:84), DOM9-112-116 (SEQ ID NO:85), DOM9-112-117 (SEQ ID NO:86), DOM9-112-118 (SEQ ID NO:87), DOM9-112-119 (SEQ ID NO:88), DOM9-112-120 (SEQ ID NO:89), DOM9-112-121 (SEQ ID NO:90), DOM9-112-122 (SEQ ID NO:91), DOM9-112-123 (SEQ ID NO:92), DOM9-112-124 (SEQ ID NO:93), DOM9-112-125 (SEQ ID NO:94), DOM9-112-126 (SEQ ID NO:95), DOM9-112-127 (SEQ ID NO:96), DOM9-112-128 (SEQ ID NO:97), DOM9-112-134 (SEQ ID NO:98), DOM9-112-135 (SEQ ID NO:99), DOM9-112-136 (SEQ ID NO:100), DOM9-112-137 (SEQ ID NO:101), DOM9-112-138 (SEQ ID NO:102), DOM9-112-140 (SEQ ID NO:103), DOM9-112-141 (SEQ ID NO:104), DOM9-112-142 (SEQ ID NO:105), DOM9-112-143 (SEQ ID NO:106), DOM9-112-144 (SEQ ID NO:107), DOM9-112-145 (SEQ ID NO:108), DOM9-112-146 (SEQ ID NO:109), DOM9-112-147 (SEQ ID NO:110), DOM9-112-148 (SEQ ID NO:111), DOM9-112-149 (SEQ ID NO:112), DOM9-112-150 (SEQ ID NO:113), DOM9-112-151 (SEQ ID NO:114), DOM9-112-152 (SEQ ID NO:115), DOM9-112-153 (SEQ ID NO:116), DOM9-112-154 (SEQ ID NO:117), DOM9-112-155 (SEQ ID NO:118), DOM9-112-156 (SEQ ID NO:119), DOM9-112-157 (SEQ ID NO:120), DOM9-112-158 (SEQ ID NO:121), DOM9-112-159 (SEQ ID NO:122), DOM9-112-160 (SEQ ID NO:123), DOM9-112-161 (SEQ ID NO:124), DOM9-112-162 (SEQ ID NO:125), DOM9-112-163 (SEQ ID NO:126), DOM9-112-164 (SEQ ID NO:127), DOM9-112-165 (SEQ ID NO:128), DOM9-112-166 (SEQ ID NO:129), DOM9-112-167 (SEQ ID NO:130), DOM9-112-168 (SEQ ID NO:131), DOM9-112-169 (SEQ ID NO:132), DOM9-112-170 (SEQ ID NO:133), DOM9-112-171 (SEQ ID NO:134), DOM9-112-172 (SEQ ID NO:135), DOM9-112-173 (SEQ ID NO:136), DOM9-112-174 (SEQ ID NO:137), DOM9-112-175 (SEQ ID NO:138), DOM9-112-176 (SEQ ID NO:139), DOM9-112-177 (SEQ ID NO:140), DOM9-112-178 (SEQ ID NO:141), DOM19-112-179 (SEQ ID NO:142), DOM9-112-180 (SEQ ID NO:143), DOM9-112-181 (SEQ ID NO:144), DOM9-112-182 (SEQ ID NO:145), DOM9-112-183 (SEQ ID NO:146), DOM9-112-184 (SEQ ID NO:147), DOM9-112-185 (SEQ ID NO:148), DOM9-112-186 (SEQ ID NO:149), DOM9-112-187 (SEQ ID NO:150), DOM9-112-188 (SEQ ID NO:151), DOM9-112-189 (SEQ ID NO:152), DOM9-112-190 (SEQ ID NO:153), DOM9-112-191 (SEQ ID NO:154), DOM9-112-192 (SEQ ID NO:155), DOM9-112-193 (SEQ ID NO:156), DOM9-112-194 (SEQ ID NO:157), DOM9-112-195 (SEQ ID NO:158), DOM9-112-196 (SEQ ID NO:159), DOM9-112-197 (SEQ ID NO:160), DOM9-112-198 (SEQ ID NO:161), DOM9-112-199 (SEQ ID NO:162), DOM9-112-200 (SEQ ID NO:163), DOM9-112-201 (SEQ ID NO:164), DOM9-112-202 (SEQ ID NO:165) DOM9-120 (SEQ ID NO:166), DOM9-121 (SEQ ID NO:167), DOM9-122 (SEQ ID NO:168), DOM9-123 (SEQ ID NO:169), DOM9-124 (SEQ ID NO:170), DOM9-125 (SEQ ID NO:171), DOM9-128 (SEQ ID NO:172), DOM9-134 (SEQ ID NO:173), DOM9-136 (SEQ ID NO:174), DOM9-26 (SEQ ID NO:349), DOM9-35 (SEQ ID NO:350), DOM9-36 (SEQ ID NO:351), DOM9-37 (SEQ ID NO:352), DOM9-38 (SEQ ID NO:353), DOM9-39 (SEQ ID NO:354), DOM9-40 (SEQ ID NO:355), DOM9-41 (SEQ ID NO:356), DOM9-43 (SEQ ID NO:357), DOM9-44 (SEQ ID NO:358), DOM9-44-500 (SEQ ID NO:359), DOM9-44-501 (SEQ ID NO:360), DOM9-44-502 (SEQ ID NO:361), DOM9-44-503 (SEQ ID NO:362), DOM9-44-504 (SEQ ID NO:363), DOM9-44-505 (SEQ ID NO:364), DOM9-44-506 (SEQ ID NO:365), DOM9-44-507 (SEQ ID NO:366), DOM9-44-509 (SEQ ID NO:367), DOM9-44-510 (SEQ ID NO:368), DOM9-44-511 (SEQ ID NO:369), DOM9-44-512 (SEQ ID NO:370), DOM9-44-513 (SEQ ID NO:371), DOM9-44-514 (SEQ ID NO:372), DOM9-44-515 (SEQ ID NO:373), DOM9-44-516 (SEQ ID NO:374), DOM9-44-517 (SEQ ID NO:375), DOM9-44-518 (SEQ ID NO:376), DOM9-44-519 (SEQ ID NO:377), DOM9-44-520 (SEQ ID NO:378), DOM9-44-521 (SEQ ID NO:379), DOM-44-522 (SEQ ID NO:380), DOM9-44-523 (SEQ ID NO:381), DOM9-44-524 (SEQ ID NO:382), DOM9-44-525 (SEQ ID NO:383), DOM9-44-526 (SEQ ID NO:384), DOM9-44-527 (SEQ ID NO:385), DOM9-44-528 (SEQ ID NO:386), DOM9-44-529 (SEQ ID NO:387), DOM9-44-530 (SEQ ID NO:388), DOM9-44-531 (SEQ ID NO:389), DOM9-44-532 (SEQ ID NO:390), DOM9-44-533 (SEQ ID NO:391), DOM9-44-534 (SEQ ID NO:392), DOM9-44-535 (SEQ ID NO:393), DOM9-44-536 (SEQ ID NO:394), DOM9-44-537 (SEQ ID NO:395), DOM9-44-538 (SEQ ID NO:396), DOM9-44-539 (SEQ ID NO:397), DOM9-44-540 (SEQ ID NO:398), DOM9-44-541 (SEQ ID NO:399), DOM9-44-542 (SEQ ID NO:400), DOM9-44-543 (SEQ ID NO:401), DOM9-44-544 (SEQ ID NO:402), DOM9-44-545 (SEQ ID NO:403), DOM9-44-546 (SEQ ID NO:404), DOM9-44-547 (SEQ ID NO:405), DOM9-44-548 (SEQ ID NO:406), DOM9-44-549 (SEQ ID NO:407), DOM9-44-550 (SEQ ID NO:408), DOM9-44-551 (SEQ ID NO:409), DOM9-44-552 (SEQ ID NO:410), DOM9-44-553 (SEQ ID NO:411), DOM9-44-554 (SEQ ID NO:412), DOM9-44-555 (SEQ ID NO:413), DOM9-44-556 (SEQ ID NO:414), DOM9-44-557 (SEQ ID NO:415), DOM9-44-558 (SEQ ID NO:416), DOM9-44-559 (SEQ ID NO:417), DOM9-44-560 (SEQ ID NO:418), DOM9-44-561 (SEQ ID NO:419), DOM9-44-562 (SEQ ID NO:420), DOM9-44-563 (SEQ ID NO:421), DOM9-44-564 (SEQ ID NO:422), DOM9-44-565 (SEQ ID NO:423), DOM9-44-566 (SEQ ID NO:424), DOM9-44-625 (SEQ ID NO:425), DOM9-44-626 (SEQ ID NO:426), DOM9-44-627 (SEQ ID NO:427), DOM9-44-628 (SEQ ID NO:428), DOM9-44-629 (SEQ ID NO:429), DOM9-44-630 (SEQ ID NO:430), DOM9-44-631 (SEQ ID NO:431), DOM9-44-632 (SEQ ID NO:432), DOM9-44-633 (SEQ ID NO:433), DOM9-44-634 (SEQ ID NO:434), DOM9-44-636 (SEQ ID NO:435), DOM9-44-637 (SEQ ID NO:436), DOM9-44-639 (SEQ ID NO:437), DOM9-44-640 (SEQ ID NO:438), DOM9-44-641 (SEQ ID NO:439), DOM9-44-642 (SEQ ID NO:440), DOM9-44-643 (SEQ ID NO:441), DOM9-44-644 (SEQ ID NO:442), DOM9-45 (SEQ ID NO:443), DOM9-46 (SEQ ID NO:444), DOM9-47 (SEQ ID NO:445), DOM9-48 (SEQ ID NO:446), DOM9-143 (SEQ ID NO:447), DOM9-144 (SEQ ID NO:448), DOM9-146 (SEQ ID NO:449), DOM9-152 (SEQ ID NO:450), DOM9-155 (SEQ ID NO:451), DOM9-155-001 (SEQ ID NO:452), DOM9-155-3 (SEQ ID NO:453), DOM9-155-5 (SEQ ID NO:454), DOM9-155-8 (SEQ ID NO:455), DOM9-155-9 (SEQ ID NO:456), DOM9-155-11 (SEQ ID NO:457), DOM9-155-13 (SEQ ID NO:458), DOM9-155-14 (SEQ ID NO:459), DOM9-155-17 (SEQ ID NO:460), DOM9-155-19 (SEQ ID NO:461), DOM9-155-20 (SEQ ID NO:462), DOM9-155-22 (SEQ ID NO:463), DOM9-155-23 (SEQ ID NO:464), DOM9-155-24 (SEQ ID NO:465), DOM9-155-25 (SEQ ID NO:466), DOM9-155-26 (SEQ ID NO:467), DOM9-155-27 (SEQ ID NO:468), DOM9-155-28 (SEQ NO:469), DOM9-155-29 (SEQ ID NO:470), DOM9-155-30 (SEQ ID NO:471), DOM9-155-31 (SEQ ID NO:472), DOM9-155-32 (SEQ ID NO:473), DOM9-155-33 (SEQ ID NO:474), DOM9-155-34 (SEQ ID NO:475), DOM9-155-35 (SEQ ID NO:476), DOM9-155-36 (SEQ ID NO:477), DOM9-155-37 (SEQ ID NO:478), DOM9-155-38 (SEQ ID NO:479), DOM9-155-39 (SEQ ID NO:480), DOM9-155-41 (SEQ ID NO:481), DOM9-155-42 (SEQ ID NO:482), DOM9-155-43 (SEQ ID NO:483), DOM9-155-44 (SEQ ID NO:484), DOM9-155-45 (SEQ ID NO:485), DOM9-155-46 (SEQ ID NO:486), DOM9-155-47 (SEQ ID NO:487), DOM9-155-48 (SEQ ID NO:488), DOM9-155-49 (SEQ ID NO:489), DOM9-155-50 (SEQ ID NO:490), DOM9-155-51 (SEQ ID NO:491), DOM9-155-52 (SEQ ID NO:492), DOM9-155-53 (SEQ ID NO:493), DOM9-158 (SEQ ID NO:494), DOM9-160 (SEQ ID NO:495), DOM9-161 (SEQ ID NO:496), DOM9-162 (SEQ ID NO:497), DOM9-163 (SEQ ID NO:498) and DOM9-164 (SEQ ID NO:499). Preferably, nucleotide sequence identity is determined over the whole length of the nucleotice sequence that encodes the selected anti-IL-4 dAb.

[0287] In other embodiments, the isolated and/or recombinant nucleic acid encoding a ligand that has binding specificity for IL-4, as described herein, wherein said nucleic acid comprises a nucleotide sequence that has at least about 80%, at least about 85%, at least about 90%, at least about 91%, at least about 92%, at least about 93%, at least about 94%, at least about 95%, at least about 96%, at least about 97%, at least about 98%, or at least about 99% nucleotide sequence identity with a nucleotide sequence encoding an anti-IL-4 dAb selected from the group consisting of DOM9-155-77 (SEQ ID NO:2393), DOM9-155-78 (SEQ ID NO:2394), DOM9-112-204 (SEQ ID NO:2395), DOM9-112-205 (SEQ ID NO:2396), DOM9-112-206 (SEQ ID NO:2397), DOM9-112-207 (SEQ ID NO:2398), DOM9-112-208 (SEQ ID NO:2399), DOM9-112-209 (SEQ ID NO:2400), DOM9-112-210 (SEQ ID NO:2401), DOM9-112-211 (SEQ ID NO:2402), DOM9-112-212 (SEQ ID NO:2403), DOM9-112-213 (SEQ ID NO:2404), DOM9-112-214 (SEQ ID NO:2405), DOM9-112-215 (SEQ ID NO:2406), DOM9-112-216 (SEQ ID NO:2407), DOM9-112-217 (SEQ ID NO:2408), DOM9-112-218 (SEQ ID NO:2409), DOM9-112-219 (SEQ ID NO:2410), DOM9-112-220 (SEQ ID NO:2411), DOM9-112-221 (SEQ ID NO:2412), DOM9-112-222 (SEQ ID NO:2413), DOM9-112-223 (SEQ ID NO:2414), DOM9-112-224 (SEQ ID NO:2415), DOM9-112-225 (SEQ ID NO:2416), DOM9-112-226 (SEQ ID NO:2417), DOM9-112-227 (SEQ ID NO:2418), DOM9-112-228 (SEQ ID NO:2419), DOM9-112-229 (SEQ ID NO:2420), DOM9-112-230 (SEQ ID NO:2421), DOM9-112-231 (SEQ ID NO:2422), DOM9-112-233 (SEQ ID NO:2423), DOM9-112-232 (SEQ ID NO:2424) and DOM9-112-234 (SEQ ID NO:2425).

[0288] In other embodiments, the isolated and/or recombinant nucleic acid encoding a ligand that has binding specificity for IL-13, as described herein, wherein said nucleic acid comprises a nucleotide sequence has at least about 80%, at least about 85%, at least about 90%, at least about 91%, at least about 92%, at least about 93%, at least about 94%, at least about 95%, at least about 96%, at least about 97%, at least about 98%, or at least about 99% nucleotide sequence identity with a nucleotide sequence encoding an anti-IL-13 dAb selected from the group consisting of DOM10-53 (SEQ ID NO:651), DOM10-53-1 (SEQ ID NO:652), DOM10-53-2 (SEQ ID NO:653), DOM10-53-3 (SEQ ID NO:654), DOM10-53-4 (SEQ ID NO:655), DOM10-53-5 (SEQ ID NO:656), DOM10-53-6 (SEQ ID NO:657), DOM10-53-7 (SEQ ID NO:658), DOM10-53-8 (SEQ ID NO:659), DOM10-53-9 (SEQ ID NO:660), DOM10-53-10 (SEQ ID NO:661), DOM10-53-11 (SEQ ID NO:662), DOM10-53-12 (SEQ ID NO:663), DOM10-53-13 (SEQ ID NO:664), DOM10-53-14 (SEQ ID NO:665), DOM10-53-15 (SEQ ID NO:666), DOM10-53-16 (SEQ ID NO:667), DOM10-53-17 (SEQ ID NO:668), DOM10-53-18 (SEQ ID NO:669), DOM10-53-19 (SEQ ID NO:670), DOM10-53-20 (SEQ ID NO:671), DOM10-53-21 (SEQ ID NO:672), DOM10-53-122 (SEQ ID NO:673), DOM10-53-123 (SEQ ID NO:674), DOM10-53-24 (SEQ ID NO:675), DOM10-53-25 (SEQ ID NO:676), DOM10-53-26 (SEQ ID NO:677), DOM10-53-27 (SEQ ID NO:678), DOM10-53-28 (SEQ ID NO:679), DOM10-53-29 (SEQ ID NO:680), DOM10-53-30 (SEQ ID NO:681), DOM10-53-31 (SEQ ID NO:682), DOM10-53-32 (SEQ ID NO:683), DOM10-53-43 (SEQ ID NO:684), DOM10-53-44 (SEQ ID NO:685), DOM10-53-45 (SEQ ID NO:686), DOM10-53-46 (SEQ ID NO:687), DOM10-53-47 (SEQ ID NO:688), DOM10-53-48 (SEQ ID NO:689), DOM10-53-49 (SEQ ID NO:690), DOM10-53-50 (SEQ ID NO:691), DOM10-53-51 (SEQ ID NO:692), DOM10-53-52 (SEQ ID NO:693), DOM10-53-53 (SEQ ID NO:694), DOM10-53-54 (SEQ ID NO:695), DOM10-53-55 (SEQ ID NO:696), DOM10-53-56 (SEQ ID NO:697), DOM10-53-57 (SEQ ID NO:698), DOM10-53-59 (SEQ ID NO:699), DOM10-53-60 (SEQ ID NO:700), DOM10-53-61 (SEQ ID NO:701), DOM10-53-62 (SEQ ID NO:702), DOM10-53-63 (SEQ ID NO:703), DOM10-53-64 (SEQ ID NO:704), DOM10-53-65 (SEQ ID NO:705), DOM10-53-66 (SEQ ID NO:706), DOM10-53-67 (SEQ ID NO:707), DOM10-53-68 (SEQ ID NO:708), DOM10-53-69 (SEQ ID NO:709), DOM10-53-70 (SEQ ID NO:710), DOM10-53-71 (SEQ ID NO:711), DOM10-53-72 (SEQ ID NO:712), DOM10-53-73 (SEQ ID NO:713), DOM10-53-74 (SEQ ID NO:714), DOM10-53-75 (SEQ ID NO:715), DOM10-53-76 (SEQ ID NO:716), DOM10-53-77 (SEQ ID NO:717), DOM10-53-78 (SEQ ID NO:718), DOM10-53-79 (SEQ ID NO:719), DOM10-53-80 (SEQ ID NO:720), DOM10-53-81 (SEQ ID NO:721), DOM10-53-82 (SEQ ID NO:722), DOM10-53-83 (SEQ ID NO:723), DOM10-53-84 (SEQ ID NO:724), DOM10-53-85 (SEQ ID NO:725), DOM10-53-86 (SEQ ID NO:726), DOM10-53-87 (SEQ ID NO:727), DOM10-53-88 (SEQ ID NO:728), DOM10-53-89 (SEQ ID NO:729), DOM10-53-91 (SEQ ID NO:730), DOM10-53-92 (SEQ ID NO:731), DOM10-53-93 (SEQ ID NO:732), DOM10-53-94 (SEQ ID NO:733), DOM10-53-95 (SEQ ID NO:734), DOM10-53-96 (SEQ ID NO:735), DOM10-53-97 (SEQ ID NO:736), DOM10-53-98 (SEQ ID NO:737), DOM10-53-99 (SEQ ID NO:738), DOM10-53-100 (SEQ ID NO:739), DOM10-53-103 (SEQ ID NO:740), DOM10-53-105 (SEQ ID NO:741), DOM10-53-106 (SEQ ID NO:742), DOM10-53-108 (SEQ ID NO:743), DOM10-53-110 (SEQ ID NO:744), DOM10-53-111 (SEQ ID NO:745), DOM10-53-112 (SEQ ID NO:746), DOM10-53-114 (SEQ ID NO:747), DOM10-53-115 (SEQ ID NO:748), DOM10-53-116 (SEQ ID NO:749), DOM10-53-117 (SEQ ID NO:750), DOM10-53-119 (SEQ ID NO:751), DOM10-53-120 (SEQ ID NO:752), DOM10-53-122 (SEQ ID NO:753), DOM10-53-201 (SEQ ID NO:754), DOM10-53-203 (SEQ ID NO:755), DOM10-53-204 (SEQ ID NO:756), DOM10-53-205 (SEQ ID NO:757), DOM10-53-206 (SEQ ID NO:758), DOM10-53-207 (SEQ ID NO:759), DOM10-53-208 (SEQ ID NO:760), DOM10-53-209 (SEQ ID NO:761), DOM10-53-210 (SEQ ID NO:762), DOM10-53-211 (SEQ ID NO:763), DOM10-53-213 (SEQ ID NO:764), DOM10-53-214 (SEQ ID NO:765), DOM10-53-215 (SEQ ID NO:766), DOM10-53-216 (SEQ ID NO:767), DOM10-53-217 (SEQ ID NO:768), DOM10-53-218 (SEQ ID NO:769), DOM10-53-219 (SEQ ID NO:770), DOM10-53-220 (SEQ ID NO:771), DOM10-53-221 (SEQ ID NO:772), DOM10-53-222 (SEQ ID NO:773), DOM10-53-223 (SEQ ID NO:774), DOM10-53-224 (SEQ ID NO:775), DOM10-53-225 (SEQ ID NO:776), DOM10-53-226 (SEQ ID NO:777), DOM10-53-227 (SEQ ID NO:778), DOM10-53-228 (SEQ ID NO:779), DOM10-53-229 (SEQ ID NO:780), DOM10-53-230 (SEQ ID NO:781), DOM10-53-231 (SEQ ID NO:782), DOM10-53-232 (SEQ ID NO:783), DOM10-53-233 (SEQ ID NO:784), DOM10-53-234 (SEQ ID NO:785), DOM10-53-235 (SEQ ID NO:786), DOM10-53-236 (SEQ ID NO:787), DOM10-53-237 (SEQ ID NO:788), DOM10-53-238 (SEQ ID NO:789), DOM10-53-239 (SEQ ID NO:790), DOM10-53-240 (SEQ ID NO:791), DOM10-53-241 (SEQ ID NO:792), DOM10-53-242 (SEQ ID NO:793), DOM10-53-243 (SEQ ID NO:794), DOM10-53-244 (SEQ ID NO:795), DOM10-53-245 (SEQ ID NO:796), DOM10-53-246 (SEQ ID NO:797), DOM10-53-247 (SEQ ID NO:798), DOM10-53-248 (SEQ ID NO:799), DOM10-53-249 (SEQ ID NO:800), DOM10-53-250 (SEQ ID NO:801), DOM10-53-251 (SEQ ID NO:802), DOM10-53-252 (SEQ ID NO:803), DOM10-53-253 (SEQ ID NO:804), DOM10-53-254 (SEQ ID NO:805), DOM10-53-255 (SEQ ID NO:806), DOM10-53-256 (SEQ ID NO:807), DOM10-53-257 (SEQ ID NO:808), DOM10-53-258 (SEQ ID NO:809), DOM10-53-259 (SEQ ID NO:810), DOM10-53-260 (SEQ ID NO:811), DOM10-53-261 (SEQ ID NO:812), DOM10-53-262 (SEQ ID NO:813), DOM10-53-263 (SEQ ID NO:814), DOM10-53-264 (SEQ ID NO:815), DOM10-53-265 (SEQ ID NO:816), DOM10-53-266 (SEQ ID NO:817), DOM10-53-267 (SEQ ID NO:818), DOM10-53-268 (SEQ ID NO:819), DOM10-53-269 (SEQ ID NO:820), DOM10-53-270 (SEQ ID NO:821), DOM10-53-271 (SEQ ID NO:822), DOM10-53-272 (SEQ ID NO:823), DOM10-53-273 (SEQ ID NO:824), DOM10-53-274 (SEQ ID NO:825), DOM10-53-275 (SEQ ID NO:826), DOM10-53-276 (SEQ ID NO:827), DOM10-53-277 (SEQ ID NO:828), DOM10-53-278 (SEQ ID NO:829), DOM10-53-279 (SEQ ID NO:830), DOM10-53-280 (SEQ ID NO:831), DOM10-53-281 (SEQ ID NO:832), DOM10-53-282 (SEQ ID NO:833), DOM10-53-283 (SEQ ID NO:834), DOM10-53-284 (SEQ ID NO:835), DOM10-53-285 (SEQ ID NO:836), DOM10-53-286 (SEQ ID NO:837), DOM10-53-287 (SEQ ID NO:838), DOM10-53-288 (SEQ ID NO:839), DOM10-53-289 (SEQ ID NO:840), DOM10-53-290 (SEQ ID NO:841), DOM10-53-291 (SEQ ID NO:842), DOM10-53-292 (SEQ ID NO:843), DOM10-53-293 (SEQ ID NO:844), DOM10-53-294 (SEQ ID NO:845), DOM10-53-295 (SEQ ID NO:846), DOM10-53-296 (SEQ ID NO:847), DOM10-53-297 (SEQ ID NO:848), DOM10-53-298 (SEQ ID NO:849), DOM10-53-299 (SEQ ID NO:850), DOM10-53-300 (SEQ ID NO:851), DOM10-53-301 (SEQ ID NO:852), DOM10-53-302 (SEQ ID NO:853), DOM10-53-303 (SEQ ID NO:854), DOM10-53-304 (SEQ ID NO:855), DOM10-53-305 (SEQ ID NO:856), DOM10-53-306 (SEQ ID NO:857), DOM10-53-307 (SEQ ID NO:858), DOM10-53-308 (SEQ ID NO:859), DOM10-53-309 (SEQ ID NO:860), DOM10-53-310 (SEQ ID NO:861), DOM10-53-311 (SEQ ID NO:862), DOM10-53-312 (SEQ ID NO:863), DOM10-53-314 (SEQ ID NO:864), DOM10-53-315 (SEQ ID NO:865), DOM10-53-316 (SEQ ID NO:866), DOM10-53-317 (SEQ ID NO:867), DOM10-53-318 (SEQ ID NO:868), DOM10-53-319 (SEQ ID NO:869), DOM10-53-320 (SEQ ID NO:870), DOM10-53-321 (SEQ ID NO:871), DOM10-53-322 (SEQ ID NO:872), DOM10-53-323 (SEQ ID NO:873), DOM10-53-324 (SEQ ID NO:874), DOM10-53-325 (SEQ ID NO:875), DOM10-53-326 (SEQ ID NO:876), DOM10-53-327 (SEQ ID NO:877), DOM10-53-328 (SEQ ID NO:878), DOM10-53-329 (SEQ ID NO:879), DOM10-53-330 (SEQ ID NO:880), DOM10-53-331 (SEQ ID NO:881), DOM10-53-333 (SEQ ID NO:882), DOM10-53-334 (SEQ ID NO:883), DOM10-53-336 (SEQ ID NO:884), DOM10-53-337 (SEQ ID NO:885), DOM10-53-338 (SEQ ID NO:886), DOM10-53-339 (SEQ ID NO:887), DOM10-53-340 (SEQ ID NO:888), DOM10-53-341 (SEQ ID NO:889), DOM10-53-342 (SEQ ID NO:890), DOM10-53-343 (SEQ ID NO:891), DOM10-53-344 (SEQ ID NO:892), DOM10-53-345 (SEQ ID NO:893), DOM10-53-346 (SEQ ID NO:894), DOM10-53-347 (SEQ ID NO:895), DOM10-53-348 (SEQ ID NO:896), DOM10-53-349 (SEQ ID NO:897), DOM10-53-350 (SEQ ID NO:898), DOM10-53-351 (SEQ ID NO:899), DOM10-53-352 (SEQ ID NO:900), DOM10-53-353 (SEQ ID NO:901), DOM10-53-354 (SEQ ID NO:902), DOM10-53-355 (SEQ ID NO:903), DOM10-53-356 (SEQ ID NO:904), DOM10-53-357 (SEQ ID NO:905), DOM10-53-358 (SEQ ID NO:906), DOM10-53-359 (SEQ ID NO:907), DOM10-53-360 (SEQ ID NO:908), DOM10-53-361 (SEQ ID NO:909), DOM10-53-362 (SEQ ID NO:910), DOM10-53-363 (SEQ ID NO:911), DOM10-53-364 (SEQ ID NO:912), DOM10-53-365 (SEQ ID NO:913), DOM10-53-366 (SEQ ID NO:914), DOM10-53-367 (SEQ ID NO:915), DOM10-53-368 (SEQ ID NO:916), DOM10-53-369 (SEQ ID NO:917), DOM10-53-370 (SEQ ID NO:918), DOM10-53-371 (SEQ ID NO:919), DOM10-53-372 (SEQ ID NO:920), DOM10-53-373 (SEQ ID NO:921), DOM10-53-374 (SEQ ID NO:922), DOM10-53-375 (SEQ ID NO:923), DOM10-53-376 (SEQ ID NO:924), DOM10-53-377 (SEQ ID NO:925), DOM10-53-378 (SEQ ID NO:926), DOM10-53-379 (SEQ ID NO:927), DOM10-53-380 (SEQ ID NO:928), DOM10-53-381 (SEQ ID NO:929), DOM10-53-382 (SEQ ID NO:930), DOM10-53-383 (SEQ ID NO:931), DOM10-53-384 (SEQ ID NO:932), DOM10-53-385 (SEQ ID NO:933), DOM10-53-386 (SEQ ID NO:934), DOM10-53-387 (SEQ ID NO:935), DOM10-53-388 (SEQ ID NO:936), DOM10-53-389 (SEQ ID NO:937), DOM10-53-390 (SEQ ID NO:938), DOM10-53-391 (SEQ ID NO:939), DOM10-53-392 (SEQ ID NO:940), DOM10-53-393 (SEQ ID NO:941), DOM10-53-394 (SEQ ID NO:942), DOM10-53-395 (SEQ ID NO:943), DOM10-53-396 (SEQ ID NO:944), DOM10-53-400 (SEQ ID NO:945), DOM10-53-401 (SEQ ID NO:946), DOM10-53-402 (SEQ ID NO:947), DOM10-53-403 (SEQ ID NO:948), DOM10-53-404 (SEQ ID NO:949), DOM10-53-405 (SEQ ID NO:950), DOM10-53-406 (SEQ ID NO:951), DOM10-53-407 (SEQ ID NO:952), DOM10-53-408 (SEQ ID NO:953), DOM10-53-409 (SEQ ID NO:954), DOM10-53-410 (SEQ ID NO:955), DOM10-53-411 (SEQ ID NO:956), DOM10-53-412 (SEQ ID NO:957), DOM10-53-413 (SEQ ID NO:958), DOM10-53-414 (SEQ ID NO:959), DOM10-53-415 (SEQ ID NO:960), DOM10-53-416 (SEQ ID NO:961), DOM10-53-417 (SEQ ID NO:962), DOM10-53-418 (SEQ ID NO:963), DOM10-53-419 (SEQ ID NO:964), DOM10-53-420 (SEQ ID NO:965), DOM10-53-421 (SEQ ID NO:966), DOM10-168 (SEQ ID NO:1283), DOM10-169 (SEQ ID NO:1284), DOM10-176 (SEQ ID NO:1285), DOM10-176-1 (SEQ ID NO:1286), DOM10-176-2 (SEQ ID NO:1287), DOM10-176-3 (SEQ ID NO:1288), DOM10-176-4 (SEQ ID NO:1289), DOM10-176-5 (SEQ ID NO:1290), DOM10-176-6 (SEQ ID NO:1291), DOM10-176-23 (SEQ ID NO:1292), DOM10-176-24 (SEQ ID NO:1293), DOM10-176-25 (SEQ ID NO:1294), DOM10-176-26 (SEQ ID NO:1295), DOM10-176-27 (SEQ ID NO:1296), DOM10-176-28 (SEQ ID NO:1297), DOM10-176-29 (SEQ ID NO:1298), DOM10-176-30 (SEQ ID NO:1299), DOM10-176-31 (SEQ ID NO:1300), DOM10-176-32 (SEQ ID NO:1301), DOM10-176-33 (SEQ ID NO:1302), DOM10-176-34 (SEQ ID NO:1303), DOM10-176-35 (SEQ ID NO:1304), DOM10-176-36 (SEQ ID NO:1305), DOM10-176-37 (SEQ ID NO:1306), DOM10-176-38 (SEQ ID NO:1307), DOM10-176-39 (SEQ ID NO:1308), DOM10-176-40 (SEQ ID NO:1309), DOM10-176-101 (SEC) ID NO:1310), DOM10-176-102 (SEQ ID NO:1311), DOM10-176-103 (SEQ ID NO:1312), DOM10-176-104 (SEQ ID NO:1313), DOM10-176-105 (SEQ ID NO:1314), DOM10-176-106 (SEQ ID NO:1315), DOM10-176-107 (SEQ ID NO:1316), DOM10-176-108 (SEQ ID NO:1317), DOM10-176-109 (SEQ ID NO:1318), DOM10-176-110 (SEQ ID NO:1319), DOM10-176-111 (SEQ ID NO:1320), DOM10-176-112 (SEQ ID NO:1321), DOM10-176-113 (SEQ ID NO:1322), DOM10-176-114 (SEQ ID NO:1323), DOM10-176-115 (SEQ ID NO:1324), DOM10-176-116 (SEQ ID NO:1325), DOM10-176-117 (SEQ ID NO:1326), DOM10-176-500 (SEQ ID NO:1327), DOM10-176-501 (SEQ ID NO:1328), DOM10-176-502 (SEQ ID NO:1329), DOM10-176-503 (SEQ ID NO:1330), DOM10-176-504 (SEQ ID NO:1331), DOM10-176-505 (SEQ ID NO:1332), DOM10-176-506 (SEQ ID NO:1333), DOM10-176-507 (SEQ ID NO:1334), DOM10-176-508 (SEQ ID NO:1335), DOM10-176-509 (SEQ ID NO:1336), DOM10-176-510 (SEQ ID NO:1337), DOM10-176-511 (SEQ ID NO:1338), DOM10-176-512 (SEQ ID NO:1339), DOM10-176-513 (SEQ ID NO:1340), DOM10-176-514 (SEQ ID NO:1341), DOM10-176-515 (SEQ ID NO:1342), DOM10-176-516 (SEQ ID NO:1343), DOM10-176-517 (SEQ ID NO:1344), DOM10-176-518 (SEQ ID NO:1345), DOM10-176-519 (SEQ ID NO:1346), DOM10-176-520 (SEQ ID NO:1347), DOM10-176-521 (SEQ ID NO:1348), DOM10-176-522 (SEQ ID NO:1349), DOM10-176-523 (SEQ ID NO:1350), DOM10-176-524 (SEQ ID NO:1351), DOM10-176-525 (SEQ ID NO:1352), DOM10-176-526 (SEQ ID NO:1353), DOM10-176-527 (SEQ ID NO:1354), DOM10-176-528 (SEQ ID NO:1355), DOM10-176-529 (SEQ ID NO:1356), DOM10-176-530 (SEQ ID NO:1357), DOM10-176-531 (SEQ ID NO:1358), DOM10-176-532 (SEQ ID NO:1359), DOM10-176-533 (SEQ ID NO:1360), DOM10-176-534 (SEQ ID NO:1361), DOM10-176-535 (SEQ ID NO:1362), DOM10-176-536 (SEQ ID NO:1363), DOM10-176-537 (SEQ ID NO:1364), DOM10-176-538 (SEQ ID NO: 1365), DOM10-176-539 (SEQ ID NO:1366), DOM10-176-540 (SEQ ID NO:1367), DOM10-176-541 (SEQ ID NO:1368), DOM10-176-542 (SEQ ID NO:1369), DOM10-176-543 (SEQ ID NO:1370), DOM10-176-544 (SEQ ID NO:1371), DOM10-176-545 (SEQ ID NO:1372), DOM10-176-546 (SEQ ID NO:1373), DOM10-176-547 (SEQ ID NO:1374), DOM10-176-548 (SEQ ID NO:1375), DOM10-176-549 (SEQ ID NO:1376), DOM10-176-550 (SEQ ID NO:1377), DOM10-176-551 (SEQ ID NO:1378), DOM10-176-552 (SEQ ID NO:1379), DOM10-176-553 (SEQ ID NO:1380), DOM10-176-554 (SEQ ID NO:1381), DOM10-176-555 (SEQ ID NO:1382), DOM10-176-556 (SEQ ID NO:1383), DOM10-176-557 (SEQ ID NO:1384), DOM10-176-558 (SEQ ID NO:1385), DOM10-176-559 (SEQ ID NO:1386), DOM10-176-560 (SEQ ID NO:1387), DOM10-176-561 (SEQ ID NO:1388), DOM10-176-562 (SEQ ID NO:1389), DOM10-176-563 (SEQ ID NO:1390), DOM10-176-564 (SEQ ID NO:1391), DOM10-176-565 (SEQ ID NO:1392), DOM10-176-566 (SEQ ID NO:1393), DOM10-176-567 (SEQ ID NO:1394), DOM10-176-568 (SEQ ID NO:1395), DOM10-176-569 (SEQ ID NO:1396), DOM10-176-570 (SEQ ID NO:1397), DOM10-176-571 (SEQ ID NO:1398), DOM10-176-572 (SEQ ID NO:1399), DOM10-176-573 (SEQ ID NO:1400), DOM10-176-574 (SEQ ID NO:1401), DOM10-176-575 (SEQ ID NO:1402), DOM10-176-576 (SEQ ID NO:1403), DOM10-176-577 (SEQ ID NO:1404), DOM10-176-578 (SEQ ID NO:1405), DOM10-176-579 (SEQ ID NO:1406), DOM10-176-580 (SEQ ID NO:1407), DOM10-176-581 (SEQ ID NO:1408), DOM10-176-582 (SEQ ID NO:1409), DOM10-176-583 (SEQ ID NO:1410), DOM10-176-584 (SEQ ID NO:1411), DOM10-176-585 (SEQ ID NO:1412), DOM10-176-586 (SEQ ID NO:1413), DOM10-176-587 (SEQ ID NO:1414), DOM10-176-588 (SEQ ID NO:1415), DOM10-176-589 (SEQ ID NO:1416), DOM10-176-590 (SEQ ID NO:1417), DOM10-176-591 (SEQ ID NO:1418), DOM10-176-592 (SEQ ID NO:1419), DOM10-176-593 (SEQ ID NO:1420), DOM10-176-594 (SEQ ID NO:1421), DOM10-176-595 (SEQ ID NO:1422), DOM10-176-596 (SEQ ID NO:1423), DOM10-176-597 (SEQ ID NO:1424), DOM10-176-598 (SEQ ID NO:1425), DOM10-176-599 (SEQ ID NO:1426), DOM10-176-600 (SEQ ID NO:1427), DOM10-176-601 (SEQ ID NO:1428), DOM10-176-602 (SEQ ID NO:1429), DOM10-176-603 (SEQ ID NO:1430), DOM10-176-604 (SEQ ID NO:1431), DOM10-176-605 (SEQ ID NO:1432), DOM10-176-606 (SEQ ID NO:1433), DOM10-176-607 (SEQ ID NO:1434), DOM10-176-608 (SEQ ID NO:1435), DOM10-176-609 (SEQ ID NO:1436), DOM10-176-610 (SEQ ID NO:1437), DOM10-176-611 (SEQ ID NO:1438), DOM10-176-612 (SEQ ID NO:1439), DOM10-176-613 (SEQ ID NO:1440), DOM10-176-614 (SEQ ID NO:1441), DOM10-176-615 (SEQ ID NO:1442), DOM10-176-616 (SEQ ID NO:1443), DOM10-176-617 (SEQ ID NO:1444), DOM10-176-618 (SEQ ID NO:1445), DOM10-176-619 (SEQ ID NO:1446), DOM10-176-620 (SEQ ID NO:1447), DOM10-176-621 (SEQ ID NO:1448), DOM10-176-622 (SEQ ID NO:1449), DOM10-176-623 (SEQ ID NO:1450), DOM10-176-624 (SEQ ID NO:1451), DOM10-176-625 (SEQ ID NO:1452), DOM10-176-626 (SEQ ID NO:1453), DOM10-176-627 (SEQ ID NO:1454), DOM10-176-628 (SEQ ID NO:1455), DOM10-176-629 (SEQ ID NO:1456), DOM10-176-630 (SEQ ID NO:1457), DOM10-176-631 (SEQ ID NO:1458), DOM10-176-632 (SEQ ID NO:1459), DOM10-176-633 (SEQ ID NO:1460), DOM10-176-634 (SEQ ID NO:1461), DOM10-176-635 (SEQ ID NO:1462), DOM10-176-636 (SEQ ID NO:1463), DOM10-176-637 (SEQ ID NO:1464), DOM10-176-638 (SEQ ID NO:1465), DOM10-176-639 (SEQ ID NO:1466), DOM10-176-640 (SEQ ID NO:1467), DOM10-176-641 (SEQ ID NO:1468), DOM10-176-643 (SEQ ID NO:1469), DOM10-176-644 (SEQ ID NO:1470), DOM10-176-645 (SEQ ID NO:1471), DOM10-176-646 (SEQ ID NO:1472), DOM10-176-647 (SEQ ID NO:1473), DOM10-176-648 (SEQ ID NO:1474), DOM10-176-649 (SEQ ID NO:1475), DOM10-176-650 (SEQ ID NO:1476), DOM10-176-651 (SEQ ID NO:1477), DOM10-176-652 (SEQ ID NO:1478), DOM10-176-653 (SEQ ID NO:1479), DOM10-176-654 (SEQ ID NO:1480), DOM10-176-655 (SEQ ID NO:1481), DOM10-176-656 (SEQ ID NO:1482), DOM10-176-657 (SEQ ID NO:1483), DOM10-176-658 (SEQ ID NO:1484), DOM10-176-659 (SEQ ID NO:1485), DOM10-176-660 (SEQ ID NO:1486), DOM10-176-661 (SEQ ID NO:1487), DOM10-176-662 (SEQ ID NO:1488), DOM10-176-663 (SEQ ID NO:1489), DOM10-176-664 (SEQ ID NO:1490), DOM10-176-665 (SEQ ID NO:1491), DOM10-176-666 (SEQ ID NO:1492), DOM10-176-667 (SEQ ID NO:1493), DOM10-176-668 (SEQ ID NO:1494), DOM10-176-669 (SEQ ID NO:1495), DOM10-176-670 (SEQ ID NO:1496), DOM10-176-671 (SEQ ID NO:1497), DOM10-176-672 (SEQ ID NO:1498), DOM10-176-673 (SEQ ID NO:1499), DOM10-176-674 (SEQ ID NO:1500), DOM10-176-675 (SEQ ID NO:1501), DOM10-253 (SEQ ID NO:1502), DOM10-255 (SEQ ID NO:1503), DOM10-272 (SEQ ID NO:1504), DOM10-307 (SEQ ID NO:1505), DOM10-319 (SEQ ID NO:1506) and DOM10-319-1 (SEQ ID NO:1507). Preferably, nucleotide sequence identity is determined over the whole length of the nucleotide sequence that encodes the selected anti-IL-13 dAb.

[0289] In other embodiments, the isolated and/or recombinant nucleic acid encoding a ligand that has binding specificity for IL-13, as described herein, wherein said nucleic acid comprises a nucleotide sequence has at least about 80%, at least about 85%, at least about 90%, at least about 91%, at least about 92%, at least about 93%, at least about 94%, at least about 95%, at least about 96%, at least about 97%, at at least about 98%, or at least about 99% nucleotide sequence identity with a nucleotide sequence encoding an anti-IL-13 dAb selected from the group consisting of DOM10-236 (SEQ ID NO:1804), DOM10-238 (SEQ ID NO:1805), DOM10-241 (SEQ ID NO:1806), DOM10-245 (SEQ ID NO:1807), DOM10-249 (SEQ ID NO:1808), DOM10-250 (SEQ ID NO:1809), DOM10-251 (SEQ ID NO:1810), DOM10-254 (SEQ ID NO:1811), DOM10-256 (SEQ ID NO:1812), DOM10-259 (SEQ ID NO:1813), DOM10-260 (SEQ ID NO:1814), DOM10-261 (SEQ ID NO:1815), DOM10-263 (SEQ ID NO:1816), DOM10-264 (SEQ ID NO:1817), DOM10-273 (SEQ ID NO:1818), DOM10-278 (SEQ ID NO:1819), DOM10-279 (SEQ ID NO:1820), DOM10-281 (SEQ ID NO:1821), DOM10-282 (SEQ ID NO:1822), DOM10-283 (SEQ ID NO:1823), DOM10-400 (SEQ ID NO:1824), DOM10-401 (SEQ ID NO:1825), DOM10-402 (SEQ ID NO:1826), DOM10-404 (SEQ ID NO:1827), DOM10-406 (SEQ ID NO:1828), DOM10-407 (SEQ ID NO:1829), DOM10-409 (SEQ ID NO:1830), DOM10-410 (SEQ ID NO:1831), DOM10-414 (SEQ ID NO:1832), DOM10-415 (SEQ ID NO:1833), DOM10-416 (SEQ ID NO:1834), DOM10-418 (SEQ ID NO:1835), DOM10-420 (SEQ ID NO:1836), DOM10-422 (SEQ ID NO:1837), DOM10-423 (SEQ ID NO:1838), DOM10-424 (SEQ ID NO:1839), DOM10-425 (SEQ ID NO:1840), DOM10-426 (SEQ ID NO:1841), DOM10-427 (SEQ ID NO:1842), DOM10-428 (SEQ ID NO:1843), DOM10-429 (SEQ ID NO:1844), DOM10-430 (SEQ ID NO:1845), DOM10-431 (SEQ ID NO:1846), DOM10-432 (SEQ ID NO:1847), DOM10-433 (SEQ ID NO:1848), DOM10-467 (SEQ ID NO:1849), DOM10-468 (SEQ ID NO:1850), DOM10-469 (SEQ ID NO:1851), DOM10-470 (SEQ ID NO:1852), DOM10-234 (SEQ ID NO:1853), DOM10-235 (SEQ ID NO:1854), DOM10-237 (SEQ ID NO:1855), DOM10-239 (SEQ ID NO:1856), DOM10-240 (SEQ ID NO:1857), DOM10-242 (SEQ ID NO:1858), DOM10-243 (SEQ ID NO:1859), DOM10-244 (SEQ ID NO:1860), DOM10-246 (SEQ ID NO:1861), DOM10-247 (SEQ ID NO:1862), DOM10-248 (SEQ ID NO:1863), DOM10-252 (SEQ ID NO:1864), DOM10-257 (SEQ ID NO:1865), DOM10-258 (SEQ ID NO:1866), DOM10-262 (SEQ ID NO:1867), DOM10-265 (SEQ ID NO:1868), DOM10-266 (SEQ ID NO:1869), DOM10-274 (SEQ ID NO:1870), DOM10-275 (SEQ ID NO:1871), DOM10-276 (SEQ ID NO:1872), DOM10-277 (SEQ ID NO:1873), DOM10-280 (SEQ ID NO:1874), DOM10-403 (SEQ ID NO:1875), DOM10-405 (SEQ ID NO:1876), DOM10-408 (SEQ ID NO:1877), DOM10-411 (SEQ ID NO:1878), DOM10-412 (SEQ ID NO:1879), DOM10-413 (SEQ ID NO:1880), DOM10-417 (SEQ ID NO:1881), DOM10-419 (SEQ ID NO:1882), DOM10-472 (SEQ ID NO:1883), DOM10-203 (SEQ ID NO:1884), DOM10-205 (SEQ ID NO:1885), DOM10-208 (SEQ ID NO:1886), DOM10-218 (SEQ ID NO:1887), DOM10-219 (SEQ ID NO:1888), DOM10-220 (SEQ ID NO:1889), DOM10-225 (SEQ ID NO:1890), DOM10-228 (SEQ ID NO:1891), DOM10-229 (SEQ ID NO:1892), DOM10-230 (SEQ ID NO:1893), DOM10-231 (SEQ ID NO:1894), DOM10-268 (SEQ ID NO:1895), DOM10-201 (SEQ ID NO:1896), DOM10-202 (SEQ ID NO:1897), DOM10-204 (SEQ ID NO:1898), DOM10-206 (SEQ ID NO:1899), DOM10-207 (SEQ ID NO:1900), DOM10-209 (SEQ ID NO:1901), DOM10-210 (SEQ ID NO:1902), DOM10-211 (SEQ ID NO:1903), DOM10-213 (SEQ ID NO:1904), DOM10-214 (SEQ ID NO:1905), DOM10-215 (SEQ ID NO:1906), DOM10-216 (SEQ ID NO:1907), DOM10-217 (SEQ ID NO:1908), DOM10-221 (SEQ ID NO:1909), DOM10-223 (SEQ ID NO:1910), DOM10-224 (SEQ ID NO:1911), DOM10-227 (SEQ ID NO:1912), DOM10-232 (SEQ ID NO:1913), DOM10-267 (SEQ ID NO:1914), DOM10-270 (SEQ ID NO:1915), DOM10-275-1 (SEQ ID NO:1918), DOM10-276-2 (SEQ ID NO:1919), DOM10-276-3 (SEQ ID NO:1920), DOM10-275-3 (SEQ ID NO:1979), DOM10-277-2 (SEQ ID NO:1980), DOM10-277-3 (SEQ ID NO:1981), DOM10-273-1 (SEQ ID NO:1982), DOM10-273-2 (SEQ ID NO:1983), DOM10-275-2 (SEQ ID NO:1984), DOM10-275-4 (SEQ ID NO:1985), DOM10-276-1 (SEQ ID NO:1986), DOM10-276-4 (SEQ ID NO:1987), DOM10-277-1 (SEQ ID NO:1988), DOM10-275-13 (SEQ ID NO:1989), DOM10-275-15 (SEQ ID NO:1990), DOM10-275-20 (SEQ ID NO:1991), DOM10-275-8 (SEQ ID NO:1992), DOM10-276-13 (SEQ ID NO:1993), DOM10-276-14 (SEQ ID NO:1994), DOM10-276-15 (SEQ ID NO:1995), DOM10-276-17 (SEQ ID NO:1996), DOM10-276-7 (SEQ ID NO:1997), DOM10-276-8 (SEQ ID NO:1998), DOM10-275-11 (SEQ ID NO:1999), DOM10-275-12 (SEQ ID NO:2000), DOM10-275-14 (SEQ ID NO:2001), DOM10-275-16 (SEQ ID NO:2002), DOM10-275-17 (SEQ ID NO:2003), DOM10-275-5 (SEQ ID NO:2004), DOM10-275-6 (SEQ ID NO:2005), DOM10-275-7 (SEQ ID NO:2006), DOM10-275-9 (SEQ ID NO:2007), DOM10-276-10 (SEQ ID NO:2008), DOM10-276-11 (SEQ ID NO:2009), DOM10-276-12 (SEQ ID NO:2010), DOM10-276-16 (SEQ ID NO:2011), DOM10-276-5 (SEQ ID NO:2012), DOM10-276-6 (SEQ ID NO:2013), DOM10-276-9 (SEQ ID NO:2014), DOM10-212 (SEQ ID NO:2016), DOM10-53-424 (SEQ ID NO:2017), DOM10-53-425 (SEQ ID NO:2018), DOM10-53-426 (SEQ ID NO:2019), DOM10-53-422 (SEQ ID NO:2020), DOM10-53-423 (SEQ ID NO:2021), DOM10-53-613 (SEQ ID NO:2022), DOM10-53-517 (SEQ ID NO:2023), DOM10-53-519 (SEQ ID NO:2024), DOM10-53-520 (SEQ ID NO:2025), DOM10-53-521 (SEQ ID NO:2026), DOM10-53-522 (SEQ ID NO:2027), DOM10-53-526 (SEQ ID NO:2028), DOM10-53-527 (SEQ ID NO:2029), DOM10-53-528 (SEQ ID NO:2030), DOM10-53-518 (SEQ ID NO:2031), DOM10-53-523 (SEQ ID NO:2032), DOM10-53-524 (SEQ ID NO:2033), DOM10-53-525 (SEQ ID NO:2034), DOM10-53-601 (SEQ ID NO:2035), DOM10-53-602 (SEQ ID NO:2036), DOM10-53-605 (SEQ ID NO:2037), DOM10-53-606 (SEQ ID NO:2038), DOM10-53-607 (SEQ ID NO:2039), DOM10-53-608 (SEQ ID NO:2040), DOM10-53-609 (SEQ ID NO:2041), DOM10-53-610 (SEQ ID NO:2042), DOM10-53-611 (SEQ ID NO:2043), DOM10-53-612 (SEQ ID NO:2044), DOM10-53-603 (SEQ ID NO:2045), DOM10-53-604 (SEQ ID NO:2046), DOM10-53-429 (SEQ ID NO:2047), DOM10-53-432 (SEQ ID NO:2048), DOM10-53-433 (SEQ ID NO:2049), DOM10-53-435 (SEQ ID NO:2050), DOM10-53-430 (SEQ ID NO:2051), DOM10-53-431 (SEQ ID NO:2052), DOM10-53-434 (SEQ ID NO:2053), DOM10-51-436 (SEQ ID NO:2054), DOM10-53-437 (SEQ ID NO:2055), DOM10-53-438 (SEQ ID NO:2056), DOM10-53-440 (SEQ ID NO:2057), DOM10-53-439 (SEQ ID NO:2058), DOM10-53-441 (SEQ ID NO:2059), DOM10-53-442 (SEQ ID NO:2060), DOM10-53-443 (SEQ ID NO:2061), DOM10-53-444 (SEQ ID NO:2062), DOM10-53-445 (SEQ ID NO:2063), DOM10-53-446 (SEQ ID NO:2064), DOM10-53-447 (SEQ ID NO:2065), DOM10-53-449 (SEQ ID NO:2066), DOM10-53-448 (SEQ ID NO:2067), DOM10-53-450 (SEQ ID NO:2068), DOM10-53-451 (SEQ ID NO:2069), DOM10-53-452 (SEQ ID NO:2070), DOM10-53-453 (SEQ ID NO:2071), DOM10-53-454 (SEQ ID NO:2072), DOM10-53-455 (SEQ ID NO:2073), DOM10-53-456 (SEQ ID NO:2074), DOM10-53-457 (SEQ ID NO:2075), DOM10-53-458 (SEQ ID NO:2076), DOM10-53-459 (SEQ ID NO:2077), DOM10-53-461 (SEQ ID NO:2078), DOM10-53-462 (SEQ ID NO:2079), DOM10-53-465 (SEQ ID NO:2080), DOM10-53-466 (SEQ ID NO:2081), DOM10-53-467 (SEQ ID NO:2082), DOM10-53-468 (SEQ ID NO:2083), DOM10-53-460 (SEQ ID NO:2084), DOM10-53-463 (SEQ ID NO:2085), DOM10-53-464 (SEQ ID NO:2086), DOM10-53-469 (SEQ ID NO:2087), DOM10-53-471 (SEQ ID NO:2088), DOM10-53-470 (SEQ ID NO:2089), DOM10-53-533 (SEQ ID NO:2090), DOM10-53-534 (SEQ ID NO:2091), DOM10-53-535 (SEQ ID NO:2092), DOM10-53-537 (SEQ ID NO:2093), DOM10-53-538 (SEQ ID NO:2094), DOM10-53-539 (SEQ ID NO:2095), DOM10-53-540 (SEQ ID NO:2096), DOM10-53-531 (SEQ ID NO:2097), DOM10-53-532 (SEQ ID NO:2098), DOM10-53-536 (SEQ ID NO:2099), DOM10-53-542 (SEQ ID NO:2100), DOM10-53-541 (SEQ ID NO:2101), DOM10-53-473 (SEQ ID NO:2102), DOM10-53-472 (SEQ ID NO:2103), DOM10-53-475 (SEQ ID NO:2104), DOM10-53-474 (SEQ ID NO:2105), DOM10-53-543 (SEQ ID NO:2106), DOM10-53-544 (SEQ ID NO: 107), DOM10-53-545 (SEQ ID NO:2108), DOM10-53-548 (SEQ ID NO:2109), DOM10-53-546 (SEQ ID NO:2110), DOM10-53-549 (SEQ ID NO:2111), DOM10-53-547 (SEQ ID NO:2112), DOM10-53-550 (SEQ ID NO:2113), DOM10-53-551 (SEQ ID NO:2114), DOM10-53-560 (SEQ ID NO:2115), DOM10-53-565 (SEQ ID NO:2116), DOM10-53-559 (SEQ ID NO:2117), DOM10-53-561 (SEQ ID NO:2118), DOM10-53-562 (SEQ ID NO:2119), DOM10-53-563 (SEQ ID NO:2120), DOM10-53-564 (SEQ ID NO:2121), DOM10-53-566 (SEQ ID NO:2122), DOM10-53-554 (SEQ ID NO:2123), DOM10-53-552 (SEQ ID NO:2124), DOM10-53-553 (SEQ ID NO:2125), DOM10-53-558 (SEQ ID NO:2126), DOM10-53-556 (SEQ ID NO:2127) and DOM10-53-557 (SEQ ID NO:2128).

[0290] The invention also provides a vector comprising a recombinant nucleic acid molecule of the invention. In certain embodiments, the vector is an expression vector comprising one or more expression control elements or sequences that are operably linked to the recombinant nucleic acid of the invention The invention also provides a recombinant host cell comprising a recombinant nucleic acid molecule or vector of the invention. Suitable vectors (e.g., plasmids, phagmids), expression control elements, host cells and methods for producing recombinant host cells of the invention are well-known in the art, and examples are further described herein.

[0291] Suitable expression vectors can contain a number of components, for example, an origin of replication, a selectable marker gene, one or more expression control elements, such as a transcription control element (e.g., promoter, enhancer, terminator) and/or one or more translation signals, a signal sequence or leader sequence, and the like. Expression control elements and a signal sequence, if present, can be provided by the vector or other source. For example, the transcriptional and/or translational control sequences of a cloned nucleic acid encoding an antibody chain can be used to direct expression.

[0292] A promoter can be provided for expression in a desired host cell. Promoters can be constitutive or inducible. For example, a promoter can be operably linked to a nucleic acid encoding an antibody, antibody chain or portion thereof, such that it directs transcription of the nucleic acid. A variety of suitable promoters for prokaryotic (e.g., lac, tac, T3, T7 promoters for E. coli) and eukaryotic (e.g., Simian Virus 40 early or late promoter, Rous sarcoma virus long terminal repeat promoter, cytomegalovirus promoter, adenovirus late promoter) hosts are available.

[0293] In addition, expression vectors typically comprise a selectable marker for selection of host cells carrying the vector, and, in the case of a replicable expression vector, an origin of replication. Genes encoding products which confer antibiotic or drug resistance are common selectable markers and may be used in prokaryotic (e.g. lactamase gene (ampicillin resistance), Tet gene for tetracycline resistance) and eukaryotic cells (e.g., neomycin (G418 or geneticin), gpt (mycophenolic acid), ampicillin, or hygromycin resistance genes). Dihydrofolate reductase marker genes permit selection with methotrexate in a variety of hosts. Genes encoding the gene product of auxotrophic markers of the host (e.g., LEU2, URA3, HIS3) are often used as selectable markers in yeast. Use of viral (e.g., baculovirus) or phage vectors, and vectors which are capable of integrating into the genome of the host cell, such as retroviral vectors, are also contemplated. Suitable expression vectors for expression in mammalian cells and prokaryotic cells (E. coli), insect cells (Drosophila Schnieder S2 cells, Sf9) and yeast (P. inethanolica, P. pastoris, S. cerevisiae) are well-known in the art.

[0294] Suitable host cells can be prokaryotic, including bacterial cells such as E. coli, B. subtilis and/or other suitable bacteria; eukaryotic cells, such as fungal or yeast cells (e.g., Pichia pastoris, Aspergillus sp., Saccharomyces cerevisiae, Schizosaccharomyces pombe, Neurospora crassa), or other lower eukaryotic cells, and cells of higher eukaryotes such as those from insects (e.g., Drosophila Schnieder S2 cells, Sf9 insect cells (WO 94/26087 (O'Connor)), mammals (e.g., COS cells, such as COS-1 (ATCC Accession No. CRL-1650) and COS-7 (ATCC Accession No. CRL-1651), CHO (e.g., ATCC Accession No. CRL-9096, CHO DG44 G. and Chasin, L A., Proc. Natl. Acac. Sci. USA, 77(7):4216-4220 (1980))), 293 (ATCC Accession No. CRL-1573), HeLa (ATCC Accession No. CCL-2), CV1 (ATCC Accession No. CCL-70), WOP (Dailey, L., et al., J. Virol., 54:739-749 (1985), 3T3, 293T (Pear, W. S., et al., Proc. Natl. Acad, Sci. U.S.A., 90:8392-8396 (1993)) NS0 cells, SP2/0, HuT 78 cells and the like, or plants (e.g., tobacco). (See, for example, Ausubel, F. M. et al., eds. Current Protocols in Molecular Biology, Greene Publishing Associates and John Wiley & Sons Inc. (1993).) In some embodiments, the host cell is an isolated host cell and is not part of a multicellular organism (e.g., plant or animal). In preferred embodiments, the host cell is a non-human host cell.

[0295] The invention also provides a method for producing a ligand (e.g., dual-specific ligand, multispecific ligand) of the invention, comprising maintaining a recombinant host cell comprising a recombinant nucleic acid of the invention under conditions suitable for expression of the recombinant nucleic acid, whereby the recombinant nucleic acid is expressed and a ligand is produced. In some embodiments, the method further comprises isolating the ligand.

### Preparation of Immunoglobulin Based Ligands

[0296] Ligands (e.g., dual specific ligands, multispecific) according to the invention can be prepared according to previously established techniques, used in the field of antibody engineering, for the preparation of scFv, “phage” antibodies and other engineered antibody molecules. Techniques for the preparation of antibodies are for example described in the following reviews and the references cited therein: Winter & Milstein, (1991) Nature 349:293-299; Pluckthun (1992) Immunological Reviews 130:151-188; Wright et al., (1992) Crit. Rev. Immunol. 12:125-168; Holliger, P. & Winter, G. (1993) Curr. Op. Biotechn. 4, 446-449; Carter, et al. (1995) J. Hematother. 4, 463-470; Chester, I. A. & Hawkins, R. E. (1995) Trends Biotechn. 13, 294-300; Hoogenboom, H. R. (1997) Nature Biotechnol. 15, 125-126; Fearon, D. (1997) Nature Biotechnol. 15, 618-619; Plückthun, A. & Pack, P. (1997) Immunotechnology 3, 83-105; Carter, P. & Merchant, A. M. (1997) Curr. Opin. Biotechnol. 8, 449-454; Holliger, P. & Winter, G. (1997) Cancer Immunol. Immunother. 45, 128-130.

[0297] Suitable techniques employed for selection of antibody variable domains with a desired specificity employ libraries and selection procedures which are known in the art. Natural libraries (Marks et al. (1991)J. Mol. Biol., 222: 581; Vaughan et al. (1996) Nature Biotech., 14: 309) which use rearranged V genes harvested from human B cells are well known to those skilled in the art. Synthetic libraries (Hoogenboom & Winter (1992) J. Mol. Biol., 227: 381; Barbas et al. (1992) Proc. Natl. Acad. Sci. USA, 89: 4457; Nissim et al. (1994) EMBO J, 13: 692; Griffiths et al. (1994) EMBO J., 13: 3245; De Kruif et al. (1995) J. Mol. Biol., 248: 97) are prepared by cloning immunoglobulin V genes, usually using PCR. Errors in the PCR process can lead to a high degree of randomisation. V_{H} and/or V_{L} libraries may be selected against target antigens or epitopes separately, in which case single domain binding is directly selected for, or together.

### Library Vector Systems

[0298] A variety of selection systems are known in the art which are suitable for use in the present invention. Examples of such systems are described below.

[0299] Bacteriophage lambda expression systems may be screened directly as bacteriophage plaques or as colonies of lysogens, both as previously described (Huse et al. (1989) Science, 246: 1275; Caton and Koprowski (1990) Proc. Natl. Acad. Sci. USA., 87; Mullinax et al. (1990) Proc. Natl. Acad. Sci. U.S.A., 87: 8095; Persson et al. (1991) Proc. Natl. Acad. Sci. U.S.A., 88: 2432) and are of use in the invention. Whilst such expression systems can be used to screen up to 10⁶ different members of a library, they are not really suited to screening of larger numbers (greater than 10⁶ members). Of particular use in the construction of libraries are selection display systems, which enable a nucleic acid to be linked to the polypeptide it expresses. As used herein, a selection display system is a system that permits the selection, by suitable display means, of the individual members of the library by binding the generic and/or target.

[0300] Selection protocols for isolating desired members of large libraries are known in the art, as typified by phage display techniques. Such systems, in which diverse peptide sequences are displayed on the surface of filamentous bacteriophage (Scott and Smith (1990) Science, 249: 386), have proven useful for creating libraries of antibody fragments (and the nucleotide sequences encoding them) for the in vitro selection and amplification of specific antibody fragments that bind a target antigen (McCafferty et al., WO 92/01047). The nucleotide sequences encoding the variable regions are linked to gene fragments which encode leader signals that direct them to the periplasmic space of E. coli and as a result the resultant antibody fragments are displayed on the surface of the bacteriophage, typically as fusions to bacteriophage coat proteins (e.g., pIII or pVIII). Alternatively, antibody fragments are displayed externally on lambda phage capsids (phagebodies). An advantage of phage-based display systems is that, because they are biological systems, selected library members can be amplified simply by growing the phage containing the selected library member in bacterial cells. Furthermore, since the nucleotide sequence that encodes the polypeptide library member is contained on a phage or phagemid vector, sequencing, expression and subsequent genetic manipulation is relatively straightforward.

[0301] Methods for the construction of bacteriophage antibody display libraries and lambda phage expression libraries are well known in the art (McCafferty et al. (1990) Nature, 348: 552; Kang et al. (1991) Proc. Natl. Acad. Sci. U.S.A., 88: 4363; Clackson et al. (1991) Nature, 352: 624; Lowman et al. (1991) Biochemistry, 30: 10832; Burton et al. (1991) Proc. Natl. Acad. Sci. U.S.A., 88: 10134; Hoogenboom et al. (1991) Nucleic Acids Res., 19: 4133; Chang et al. (1991) J. Immunol., 147: 3610; Breitling et al. (1991) Gene, 104: 147; Marks et al. (1991) supra; Barbas et al. (1992) supra; Hawkins and Winter (1992) J. Immunol., 22: 867; Marks et al., 1992, J. Biol. Chem., 267: 16007; Lerner et al. (1992) Science, 258: 1313, incorporated herein by reference).

[0302] One particularly advantageous approach has been the use of scFv phage-libraries (Huston et al., 1988, Proc. Natl. Acad. Sci. U.S.A., 85: 5879-5883; Chaudhary et al. (1990) Proc. Natl. Acad. Sci. U.S.A., 87: 1066-1070; McCafferty et al. (1990) supra; Clackson et al. (1991) Nature, 352: 624; Marks et al. (1991) J Mol. Biol., 222: 581; Chiswell et al. (1992) Trends Biotech., 10: 80; Marks et al. (1992) J. Biol. Chem., 267). Various embodiments of scFv libraries displayed on bacteriophage coat proteins have been described. Refinements of phage display approaches are also known, for example as described in WO96/06213 and WO92/01047 (Medical Research Council et al.) and WO97/08320 (Morphosys), which are incorporated herein by reference.

[0303] Other systems for generating libraries of polypeptides involve the use of cell-free enzymatic machinery for the in vitro synthesis of the library members. In one method, RNA molecules are selected by alternate rounds of selection against a target and PCR amplification (Tuerk and Gold (1990) Science, 249: 505; Ellington and Szostak (1990) Nature, 346: 818). A similar technique may be used to identify DNA sequences which bind a predetermined human transcription factor (Thiesen and Bach (1990) Nucleic Acids Res., 18: 3203; Beaudry and Joyce (1992) Science, 257: 635; WO92/05258 and WO92/14843). In a similar way, in vitro translation can be used to synthesise polypeptides as a method for generating large libraries. These methods which generally comprise stabilised polysome complexes, are described further in WO88/08453, WO90/05785, WO90/07003, WO91/02076, WO91/05058, and WO92/02536. Alternative display systems which are not phage-based, such as those disclosed in WO95/22625 and WO95/11922 (Affymax) use the polysomes to display polypeptides for selection.

[0304] A still further category of techniques involves the selection of repertoires in artificial compartments, which allow the linkage of a gene with its gene product. For example, a selection system in which nucleic acids encoding desirable gene products may be selected in microcapsules formed by water-in-oil emulsions is described in WO99/02671, WO00/40712 and Tawfik & Griffiths (1998) Nature Biotechnol 16(7), 652-6. Genetic elements encoding a gene product having a desired activity are compartmentalised into microcapsules and then transcribed and/or translated to produce their respective gene products (RNA or protein) within the microcapsules. Genetic elements which produce gene product having desired activity are subsequently sorted. This approach selects gene products of interest by detecting the desired activity by a variety of means.

### Library Construction

[0305] Libraries intended for selection, may be constructed using techniques known in the art, for example as set forth above, or may be purchased from commercial sources, Libraries which are useful in the present invention are described, for example, in WO99/20749. Once a vector system is chosen and one or more nucleic acid sequences encoding polypeptides of interest are cloned into the library vector, one may generate diversity within the cloned molecules by undertaking mutagenesis prior to expression; alternatively, the encoded proteins may be expressed and selected, as described above, before mutagenesis and additional rounds of selection are performed. Mutagenesis of nucleic acid sequences encoding structurally optimized polypeptides is carried out by standard molecular methods. Of particular use is the polymerase chain reaction, or PCR, (Mullis and Faloona (1987) Methods Enzymol., 155: 335, herein incorporated by reference). PCR, which uses multiple cycles of DNA replication catalyzed by a thermostable, DNA-dependent DNA polymerase to amplify the target sequence of interest, is well known in the art. The construction of various antibody libraries has been discussed in Winter et al. (1994) Ann. Rev. Immunology 12, 433-55, and references cited therein.

[0306] PCR is performed using template DNA (at least 1 fg; more usefully, 1-1000 ng) and at least 25 pmol of oligonucleotide primers; it may be advantageous to use a larger amount of primer when the primer pool is heavily heterogeneous, as each sequence is represented by only a small fraction of the molecules of the pool, and amounts become limiting in the later amplification cycles. A typical reaction mixture includes: 2 μl of DNA, 25 pmol of oligonucleotide primer, 2.5 μl of 10×PCR buffer 1 (Perkin-Elmer, Foster City, Calif.), 0.4 μl of 1.25 μM dNTP, 0.15 μl (or 2.5 units) of Taq DNA polymerase (Perkin Elmer, Foster City, Calif.) and deionized water to a total volume of 25 μl. Mineral oil is overlaid and the PCR is performed using a programmable thermal cycler. The length and temperature of each step of a PCR cycle, as well as the number of cycles, is adjusted in accordance to the stringency requirements in effect. Annealing temperature and timing are determined both by the efficiency with which a primer is expected to anneal to a template and the degree of mismatch that is to be tolerated; obviously, when nucleic acid molecules are simultaneously amplified and mutagenised, mismatch is required, at least in the first round of synthesis. The ability to optimise the stringency of primer annealing conditions is well within the knowledge of one of moderate skill in the art. An annealing temperature of between 30° C. and 72° C. is used. Initial denaturation of the template molecules normally occurs at between 92° C. and 99° C. for 4 minutes, followed by 20-40 cycles consisting of denaturation (94-99° C. for 15 seconds to 1 minute), annealing (temperature determined as discussed above; 1-2 minutes), and extension (72° C. for 1-5 minutes, depending on the length of the amplified product). Final extension is generally for 4 minutes at 72° C., and may be followed by an indefinite (0-24 hour) step at 4° C.

### Combining Single Variable Domains

[0307] Domains useful in the invention, once selected, may be combined by a variety of methods known in the art, including covalent and non-covalent methods. Preferred methods include the use of polypeptide linkers, as described, for example, in connection with scFv molecules (Bird et al., (1988) Science 242:423-426). Discussion of suitable linkers is provided in Bird et al. Science 242, 423-426; Hudson et al, Journal Immunol Methods 231 (1999) 177-189; Hudson et al, Proc. Nat. Acad. Sci. U.S.A. 85, 5879-5883. Linkers are preferably flexible, allowing the two single domains to interact. One linker example is a (Gly₄ Ser)ₙ linker, where n=1 to 8, e.g., 2, 3, 4, 5 or 7. The linkers used in diabodies, which are less flexible, may also be employed (Holliger et al., (1993) Proc. Nat, Acad. Sci. U.S.A. 90:6444-6448). In one embodiment, the linker employed is not an immunoglobulin hinge region.

[0308] Variable domains may be combined using methods other than linkers. For example, the use of disulphide bridges, provided through naturally-occurring or engineered cysteine residues, may be exploited to stabilize V_{H}-V_{H}, V_{L}-V_{L} or V_{H}-V_{L}, dimers (Reiter et al., (1994) Protein Eng. 7:697-704) or by remodelling the interface between the variable domains to improve the “fit” and thus the stability of interaction (Ridgeway et al., (1996) Protein Eng. 7:617-621; Zhu et al., (1997) Protein Science 6:781-788). Other techniques for joining or stabilizing variable domains of immunoglobulins, and in particular antibody V_{H} domains, may be employed as appropriate.

### Characterisation of Ligands

[0309] The binding of a dual-specific ligand to the cell or the binding of each binding domain to each specific target can be tested by methods which will be familiar to those skilled in the art and include RASA. In a preferred embodiment of the invention, binding is tested using monoclonal phage ELISA. Phage ELISA may be performed according to any suitable procedure: an exemplary protocol is set forth below.

[0310] Populations of phage produced at each round of selection can be screened for binding by ELISA to the selected antigen or epitope, to identify “polyclonal” phage antibodies. Phage from single infected bacterial colonies from these populations can then be screened by ELISA to identify “monoclonal” phage antibodies. It is also desirable to screen soluble antibody fragments for binding to antigen or epitope, and this can also be undertaken by ELISA using reagents, for example, against a C- or N-terminal tag (see for example Winter et al. (1994) Ann. Rev. Immunology 12, 433-55 and references cited therein.

[0311] The diversity of the selected phage monoclonal antibodies may also be assessed by gel electrophoresis of PCR products (Marks et al. 1991, supra; Nissim et al. 1994 supra), probing (Tomlinson et al., 1992) J. Mol. Biol. 227, 776) or by sequencing of the vector DNA.

### Structure of Ligands

[0312] In the case that each variable domain is selected from V-gene repertoires selected for instance using phage display technology as herein described, then these variable domains comprise a universal framework region, such that is they may be recognized by a generic ligand as herein defined. The use of universal frameworks, generic ligands and the like is described in WO99/20749.

[0313] Where V-gene repertoires are used, variation in polypeptide sequence is preferably located within the structural loops of the variable domains. The polypeptide sequences of either variable domain may be altered by DNA shuffling or by mutation in order to enhance the interaction of each variable domain with its complementary pair. DNA shuffling is known in the art and taught, for example, by Stemmer, 1994, Nature 370: 389-391 and U.S. Pat. No. 6,297,053, both of which are incorporated herein by reference. Other methods of mutagenesis are well known to those of skill in the art.

[0314] In general, nucleic acid molecules and vector constructs required for selection, preparation and formatting dual-specific ligands may be constructed and manipulated as set forth in standard laboratory manuals, such as Sambrook et al. (1989) Molecular Cloning: A Laboratory Manual, Cold Spring Harbor, USA.

[0315] The manipulation of nucleic acids useful in the present invention is typically carried out in recombinant vectors. As used herein, vector refers to a discrete element that is used to introduce heterologous DNA into cells for the expression and/or replication thereof. Methods by which to select or construct and, subsequently, use such vectors are well known to one of ordinary skill in the art. Numerous vectors are publicly available, including bacterial plasmids, bacteriophage, artificial chromosomes and episomal vectors. Such vectors may be used for simple cloning and mutagenesis; alternatively a gene expression vector is employed. A vector of use according to the invention may be selected to accommodate a polypeptide coding sequence of a desired size, typically from 0.25 kilobase (kb) to 40 kb or more in length. A suitable host cell is transformed with the vector after in vitro cloning manipulations. Each vector contains various functional components, which generally include a cloning (or “polylinker”) site, an origin of replication and at least one selectable marker gene. If the given vector is an expression vector, it additionally possesses one or more of the following: an enhancer element, a promoter, transcription, termination and signal sequences, each positioned in the vicinity of the cloning site, such that they are operatively linked to the gene encoding a dual-specific ligand according to the invention.

[0316] Both cloning and expression vectors generally contain nucleic acid sequences that enable the vector to replicate in one or more selected host cells. Typically in cloning vectors, this sequence is one that enables the vector to replicate independently of the host chromosomal DNA and includes origins of replication or autonomously replicating sequences. Such sequences are well known for a variety of bacteria, yeast and viruses. The origin of replication from the plasmid pBR322 is suitable for most Gram-negative bacteria, the 2 micron plasmid origin is suitable for yeast, and various viral origins (e.g. SV 40, adenovirus) are useful for cloning vectors in mammalian cells. Generally, the origin of replication is not needed for mammalian expression vectors unless these are used in mammalian cells able to replicate high levels of DNA, such as COS cells.

[0317] Advantageously, a cloning or expression vector may contain a selection gene also referred to as selectable marker. This gene encodes a protein necessary for the survival or growth of transformed host cells grown in a selective culture medium. Host cells not transformed with the vector containing the selection gene will therefore not survive in the culture medium. Typical selection genes encode proteins that confer resistance to antibiotics and other toxins, (e.g. ampicillin, neomycin, methotrexate or tetracycline), complement auxotrophic deficiencies, or supply critical nutrients not available in the growth media.

[0318] Since the replication of vectors encoding a dual-specific ligand according to the present invention is most conveniently performed in E. coli, an E. coli-selectable marker, for example, the β-lactamase gene that confers resistance to the antibiotic ampicillin, is of use. These can be obtained from E. coli plasmids, such as pBR322 or a pUC plasmid such as pUC18 or pUC19.

[0319] Expression vectors usually contain a promoter that is recognised by the host organism and is operably linked to the coding sequence of interest. Such a promoter may be inducible or constitutive. The term “operably linked” refers to a juxtaposition wherein the components described are in a relationship permitting them to function in their intended manner. A control sequence “operably linked” to a coding sequence is ligated in such a way that expression of the coding sequence is achieved under conditions compatible with the control sequences.

[0320] Promoters suitable for use with prokaryotic hosts include, for example, the β-lactamase and lactose promoter systems, alkaline phosphatase, the tryptophan (trp) promoter system and hybrid promoters such as the tac promoter. Promoters for use in bacterial systems will also generally contain a Shine-Delgarno sequence operably linked to the coding sequence.

[0321] The preferred vectors are expression vectors that enable the expression of a nucleotide sequence corresponding to a polypeptide library member. Thus, selection with the first and/or second antigen or epitope can be performed by separate propagation and expression of a single clone expressing the polypeptide library member or by use of any selection display system. As described above, the preferred selection display system is bacteriophage display. Thus, phage or phagemid vectors may be used., (e.g., pIT1 or pIT2). Leader sequences useful in the invention include pelB, stII, ompA, phoA, bla and pelA. One example is phagemid vectors, which have an E. coli origin of replication (for double stranded replication) and also a phage origin of replication (for production of single-stranded DNA). The manipulation and expression of such vectors is well known in the art (Hoogenboom and Winter (1992) supra; Nissim et al. (1994) supra). Briefly, the vector contains a β-lactamase gene to confer selectivity on the phagemid and a lac promoter upstream of an expression cassette that consists (N to C terminal) of a pelB leader sequence (which directs the expressed polypeptide to the periplasmic space), a multiple cloning site (for cloning the nucleotide version of the library member), optionally, one or more peptide tags (for detection), optionally, one or more TAG stop codon and the phage protein pill. Thus, using various suppressor and non-suppressor strains of E. coli and with the addition of glucose, iso-propyl thio-β-D-galactoside (IPTG) or a helper phage, such as VCS M13, the vector is able to replicate as a plasmid with no expression, produce large quantities of the polypeptide library member only or produce phage, some of which contain at least one copy of the polypeptide-pIII fusion on their surface.

[0322] Construction of vectors encoding dual-specific ligands according to the invention employs conventional ligation techniques. Isolated vectors or DNA fragments are cleaved, tailored, and religated in the form desired to generate the required vector. If desired, analysis to confirm that the correct sequences are present in the constructed vector can be performed in a known fashion. Suitable methods for constructing expression vectors, preparing in vitro transcripts, introducing DNA into host cells, and performing analyses for assessing expression and function are known to those skilled in the art. The presence of a gene sequence in a sample is detected, or its amplification and/or expression quantified by conventional methods, such as Southern or Northern analysis, Western blotting, dot blotting of DNA, RNA or protein, in situ hybridisation, immunocytochemistry or sequence analysis of nucleic acid or protein molecules. Those skilled in the art will readily envisage how these methods may be modified, if desired.

### Skeletons

[0323] Skeletons may be based on immunoglobulin molecules or may be non-immunoglobulin in origin as set forth above. Each domain of a ligand (e.g., dual-specific ligand) may be a different skeleton. Preferred immunoglobulin skeletons as herein defined includes any one or more of those selected from the following: an immunoglobulin molecule comprising at least (i) the CL (kappa or lambda subclass) domain of an antibody; or (ii) the CH1 domain of an antibody heavy chain; an immunoglobulin molecule comprising the CH1 and CH2 domains of an antibody heavy chain; an immunoglobulin molecule comprising the CH1, CH2 and CH3 domains of an antibody heavy chain; or any of the subset (ii) in conjunction with the CL (kappa or lambda subclass) domain of an antibody. A hinge region domain may also be included. For example, the ligand can comprise a heavy chain constant region of an immunoglobulin (e.g., IgG (e.g., IgG1, IgG2, IgG3, IgG4) IgM, IgA, IgD or IgE) or portion thereof (e.g., Fc portion) and/or a light chain constant region (e.g., C_{λ}., C_{κ}). For example, the ligand can comprise CH1 of IgG1 (e.g., human IgG1), CH1 and CH2 of IgG1 (e.g., human IgG1), CH1, CH2 and CH3 of IgG1 (e.g., human IgG1), CH2 and CH3 of IgG1 (e.g., human IgG1), or CH1 and CH3 of IgG1 (e.g., human IgG1). Such combinations of domains may, for example, mimic natural antibodies, such as IgG or IgM, or fragments thereof, such as Fv, say, Fab or F(ab′)₂ molecules. Those skilled in the art will be aware that this list is not intended to be exhaustive.

### Protein Scaffolds

[0324] Each binding domain can comprise a protein scaffold and one or more CDRs (e.g., of the dAbs disclosed herein) which are involved in the specific interaction of the domain with one or more epitopes. Advantageously, an epitope binding domain according to the present invention comprises three CDRs. Suitable protein scaffolds include any of those selected from the group consisting of the following: those based on immunoglobulin domains, those based on fibronectin, those based on affibodies, those based on CTLA4, those based on chaperones such as GroEL, those based on lipocallin and those based on the bacterial Fc receptors SpA and SpD. Those skilled in the art will appreciate that this list is not intended to be exhaustive. The binding domains can also comprise a protein scaffold that has a binding site that has binding specificity for a target (e.g., IL-4, IL-13), but does not contain one or more CDRs (e.g., of the dAbs disclosed herein). For example, the binding domain can be a protein scaffold that has a binding site that has binding specificity for a target selected from an affibody, an SpA domain, based on CTLA4, those based on chaperones such as GroEL, those based on lipocallin and those based on the bacterial Fc receptors SpA and SpD, an LDL receptor class A domain, an avimer (see, e.g., U.S. Patent Application Publication Nos. 2005/0053973, 2005/0089932, 2005/0164301).

### Scaffolds for Use in Constructing Ligands

### Selection of the Main-Chain Conformation

[0325] The members of the immunoglobulin superfamily all share a similar fold for their polypeptide chain. For example, although antibodies are highly diverse in terms of their primary sequence, comparison of sequences and crystallographic structures has revealed that, contrary to expectation, five of the six antigen binding loops of antibodies (H1, H2, L1, L2, L3) adopt a limited number of main-chain conformations, or canonical structures (Chothia and Lesk (1987) J. Mol. Biol., 196: 901; Chothia et al. (1989) Nature, 342: 877). Analysis of loop lengths and key residues has therefore enabled prediction of the main-chain conformations of H1, H2, L1, L2 and L3 found in the majority of human antibodies (Chothia et al. (1992) J. Mol. Biol., 227: 799; Tomlinson et al. (1995) EMBO J., 14: 4628; Williams et al. (1996) J. Mol. 13101., 264: 220), Although the H3 region is much more diverse in terms of sequence, length and structure (due to the use of D segments), it also forms a limited number of main-chain conformations for short loop lengths which depend on the length and the presence of particular residues, or types of residue, at key positions in the loop and the antibody framework (Martin et al, (1996) J. Mol. Biol., 263: 800; Shirai et al. (1996) FEBS Letters, 399: 1).

[0326] Libraries of ligands and/or binding domains can be designed in which certain loop lengths and key residues were chosen to ensure that the main-chain conformation of the members is known. Advantageously, these are real conformations of immunoglobulin superfamily molecules found in nature, to minimize the chances that they are non-functional, as discussed above. Germline V gene segments serve as one suitable basic framework for constructing antibody or T-cell receptor libraries; other sequences are also of use. Variations may occur at a low frequency, such that a small number of functional members may possess an altered main-chain conformation, which does not affect its function.

[0327] Canonical structure theory is also of use to assess the number of different main-chain conformations encoded by ligands, to predict the main-chain conformation based on dual-specific ligand sequences and to choose residues for diversification which do not affect the canonical structure. It is known that, in the human V_{κ} domain, the L1 loop can adopt one of four canonical structures, the L2 loop has a single canonical structure and that 90% of human V_{κ} domains adopt one of four or five canonical structures for the L3 loop (Tomlinson et al. (1995) supra); thus, in the V_{κ} domain alone, different canonical structures can combine to create a range of different main-chain conformations. Given that V_{λ} the domain encodes a different range of canonical structures for the L1, L2 and L3 loops and that V_{κ} and V_{λ} domains can pair with any V_{H} domain which can encode several canonical structures for the H1 and H2 loops, the number of canonical structure combinations observed for these five loops is very large. This implies that the generation of diversity in the main-chain conformation may be essential for the production of a wide range of binding specificities. However, by constructing an antibody library based on a single known main-chain conformation it has been found, contrary to expectation, that diversity in the main-chain conformation is not required to generate sufficient diversity to target substantially all antigens. Even more surprisingly, the single main-chain conformation need not be a consensus structure—a single naturally occurring conformation can be used as the basis for an entire library. Thus, in a preferred aspect, the ligands of the invention possess a single known main-chain conformation.

[0328] The single main-chain conformation that is chosen is preferably commonplace among molecules of the immunoglobulin superfamily type in question. A conformation is commonplace when a significant number of naturally occurring molecules are observed to adopt it. Accordingly, in a preferred aspect of the invention, the natural occurrence of the different main-chain conformations for each binding loop of an immunoglobulin domain are considered separately and then a naturally occurring variable domain is chosen which possesses the desired combination of main-chain conformations for the different loops. If none is available, the nearest equivalent may be chosen. It is preferable that the desired combination of main-chain conformations for the different loops is created by selecting germline gene segments which encode the desired main-chain conformations. It is more preferable that the selected germline gene segments are frequently expressed in nature, and most preferable that they are the most frequently expressed of all natural germline gene segments.

[0329] In designing ligands (e.g., ds-dAbs), or libraries thereof, the incidence of the different main-chain conformations for each of the six antigen binding loops may be considered separately. For H1, H2, L1, L2 and L3, a given conformation that is adopted by between 20% and 100% of the antigen binding loops of naturally occurring molecules is chosen. Typically, its observed incidence is above 35% (i.e. between 35% and 100%) and, ideally, above 50% or even above 65%. Since the vast majority of H3 loops do not have canonical structures, it is preferable to select a main-chain conformation which is commonplace among those loops which do display canonical structures. For each of the loops, the conformation which is observed most often in the natural repertoire is therefore selected. In human antibodies, the most popular canonical structures (CS) for each loop are as follows: H1-CS 1 (79% of the expressed repertoire), H2-CS 3 (46%), L1-CS 2 of V_{κ} (39%), L2-CS 1 (100%), L3-CS 1 of V_{κ} (36%) (calculation assumes a κ:λ ratio of 70:30, Hood et al. (1967) Cold Spring Harbor Symp. Quant. Biol., 48: 133). For H3 loops that have canonical structures, a CDR3 length (Kabat et al, (1991) Sequences of proteins of immunological interest, U.S. Department of Health and Human Services) of seven residues with a salt-bridge from residue 94 to residue 101 appears to be the most common. There are at least 16 human antibody sequences in the EMBL data library with the required H13 length and key residues to form this conformation and at least two crystallographic structures in the protein data bank which can be used as a basis for antibody modelling (2cgr and 1tet). The most frequently expressed germline gene segments with this combination of canonical structures are the V_{H} segment 3-23 (DP-47), the J_{H} segment JH4b, the V_{κ} segment O2/O12 (DPK9) and the J_{κ} segment J_{κ}1. V_{H} segments DP45 and DP38 are also suitable. These segments can therefore be used in combination as a basis to construct a library with the desired single main-chain conformation.

[0330] Alternatively, instead of choosing the single main-chain conformation based on the natural occurrence of the different main-chain conformations for each of the binding loops in isolation, the natural occurrence of combinations of main-chain conformations is used as the basis for choosing the single main-chain conformation. In the case of antibodies, for example, the natural occurrence of canonical structure combinations for any two, three, four, five or for all six of the antigen binding loops can be determined. Here, it is preferable that the chosen conformation is commonplace in naturally occurring antibodies and most preferable that it observed most frequently in the natural repertoire. Thus, in human antibodies, for example, when natural combinations of the five antigen binding loops, H1, H2, L1, L2 and L3, are considered, the most frequent combination of canonical structures is determined and then combined with the most popular conformation for the H3 loop, as a basis for choosing the single main-chain conformation.

### Diversification of the Canonical Sequence

[0331] Having selected several known main-chain conformations or, preferably a single known main-chain conformation, dual-specific ligands (e.g., ds-dAbs) or libraries for use in the invention can be constructed by varying each binding site of the molecule in order to generate a repertoire with structural and/or functional diversity. This means that variants are generated such that they possess sufficient diversity in their structure and/or in their function so that they are capable of providing a range of activities.

[0332] The desired diversity is typically generated by varying the selected molecule at one or more positions. The positions to be changed can be chosen at random or are preferably selected. The variation can then be achieved either by randomisation, during which the resident amino acid is replaced by any amino acid or analogue thereof, natural or synthetic, producing a very large number of variants or by replacing the resident amino acid with one or more of a defined subset of amino acids, producing a more limited number of variants.

[0333] Various methods have been reported for introducing such diversity. Error-prone PCR (Hawkins et al. (1992)J. Mol. Biol., 226: 889), chemical mutagenesis (Deng et al. (1994) J. Biol. Chem., 269: 9533) or bacterial mutator strains (Low et al. (1996) J. Mol. Biol., 260: 359) can be used to introduce random mutations into the genes that encode the molecule. Methods for mutating selected positions are also well known in the art and include the use of mismatched oligonucleotides or degenerate oligonucleotides, with or without the use of PCR. For example, several synthetic antibody libraries have been created by targeting mutations to the antigen binding loops. The H3 region of a human tetanus toxoid-binding Fab has been randomised to create a range of new binding specificities (Barbas et al. (1992) Proc. Natl. Acad. Sci. USA, 89: 4457). Random or semi-random H3 and L3 regions have been appended to germline V gene segments to produce large libraries with unmutated framework regions (Hoogenboom & Winter (1992) J. Mol. Biol., 227: 381; Barbas et al. (1992) Proc. Natl. Acad. Set. USA, 89: 4457; Nissim et al. (1994) EMBO J, 13: 692; Griffiths et al. (1994) EMBO J., 13: 3245; De Kruif et al. (1995) J. Mol. Biol., 248: 97). Such diversification has been extended to include some or all of the other antigen binding loops (Crameri et al. (1996) Nature Med., 2: 100; Riechmann et al. (1995) Bio/Technology, 13: 475; Morphosys, WO97/08320, supra).

[0334] Since loop randomization has the potential to create approximately more than 10¹⁵ structures for H3 alone and a similarly large number of variants for the other five loops, it is not feasible using current transformation technology or even by using cell free systems to produce a library representing all possible combinations. For example, in one of the largest libraries constructed to date, 6×10¹⁰ different antibodies, which is only a fraction of the potential diversity for a library of this design, were generated (Griffiths et al. (1994) supra).

[0335] Preferably, only the residues that are directly involved in creating or modifying the desired function of each domain of the dual-specific ligand molecule are diversified. For many molecules, the function of each domain will be to bind a target and therefore diversity should be concentrated in the target binding site, while avoiding changing residues which are crucial to the overall packing of the molecule or to maintaining the chosen main-chain conformation.

### Diversification of the Canonical Sequence as it Applies to Antibody Domains

[0336] In the case of antibody based ligands (e.g., ds-dAbs), the binding site for each target is most often the antigen binding site. Thus, preferably only those residues in the antigen binding site are varied. These residues are extremely diverse in the human antibody repertoire and are known to make contacts in high-resolution antibody/antigen complexes. For example, in L2 it is known that positions 50 and 53 are diverse in naturally occurring antibodies and are observed to make contact with the antigen. In contrast, the conventional approach would have been to diversify all the residues in the corresponding Complementarity Determining Region (CDR1) as defined by Kabat et al. (1991, supra), some seven residues compared to the two diversified in the library for use according to the invention. This represents a significant improvement in terms of the functional diversity required to create a range of antigen binding specificities.

[0337] In nature, antibody diversity is the result of two processes: somatic recombination of germline V, D and J gene segments to create a naive primary repertoire (so called germline and junctional diversity) and somatic hypermutation of the resulting rearranged V genes. Analysis of human antibody sequences has shown that diversity in the primary repertoire is focused at the centre of the antigen binding site whereas somatic hypermutation spreads diversity to regions at the periphery of the antigen binding site that are highly conserved in the primary repertoire (see Tomlinson et al. (1996) J. Mol. Biol., 256: 813). This complementarity has probably evolved as an efficient strategy for searching sequence space and, although apparently unique to antibodies, it can easily be applied to other polypeptide repertoires. The residues which are varied are a subset of those that form the binding site for the target. Different (including overlapping) subsets of residues in the target binding site are diversified at different stages during selection, if desired.

[0338] In the ease of an antibody repertoire, an initial ‘naive’ repertoire can be created where some, but not all, of the residues in the antigen binding site are diversified. As used herein in this context, the term “naive” refers to antibody molecules that have no pre-determined target. These molecules resemble those which are encoded by the immunoglobulin genes of an individual who has not undergone immune diversification, as is the case with fetal and newborn individuals, whose immune systems have not yet been challenged by a wide variety of antigenic stimuli. This repertoire is then selected against a range of antigens or epitopes. If required, further diversity can then be introduced outside the region diversified in the initial repertoire. This matured repertoire can be selected for modified function, specificity or affinity.

[0339] Naive repertoires of binding domains for the construction of dual-specific ligands in which some or all of the residues in the antigen binding site are varied are known in the art. (See, WO 2004/058821, WO 2004/003019, and WO 03/002609). The “primary” library mimics the natural primary repertoire, with diversity restricted to residues at the center of the antigen binding site that are diverse in the germline V gene segments (germline diversity) or diversified during the recombination process (junctional diversity). Those residues which are diversified include, but are not limited to, H50, H52, H52a, H53, H55, H56, H58, H95, H-96, H97, H98, L50, L53, L91, L92, L93, L94 and L96. In the “somatic” library, diversity is restricted to residues that are diversified during the recombination process (junctional diversity) or are highly somatically mutated. Those residues which are diversified include, but are not limited to: H31, H33, H35, H95, H96, H97, H98, L30, L31, L32, L34 and L96. All the residues listed above as suitable for diversification in these libraries are known to make contacts in one or more antibody-antigen complexes. Since in both libraries, not all of the residues in the antigen binding site are varied, additional diversity is incorporated during selection by varying the remaining residues, if it is desired to do so. It shall be apparent to one skilled in the art that any subset of any of these residues (or additional residues which comprise the antigen binding site) can be used for the initial and/or subsequent diversification of the antigen binding site.

[0340] In the construction of libraries for use in the invention, diversification of chosen positions is typically achieved at the nucleic acid level, by altering the coding sequence which specifies the sequence of the polypeptide such that a number of possible amino acids (all 20 or a subset thereof) can be incorporated at that position. Using the IUPAC nomenclature, the most versatile codon is NNK, which encodes all amino acids as well as the TAG stop codon. The NNK codon is preferably used in order to introduce the required diversity. Other codons which achieve the same ends are also of use, including the NNN codon, which leads to the production of the additional stop codons TGA and TAA.

[0341] A feature of side-chain diversity in the antigen binding site of human antibodies is a pronounced bias which favors certain amino acid residues. If the amino acid composition of the ten most diverse positions in each of the V_{H}, V_{κ} and V_{λ} regions are summed, more than 76% of the side-chain diversity comes from only seven different residues, these being, serine (24%), tyrosine (14%), asparagine (11%), glycine (9%), alanine (7%), aspartate (6%) and threonine (6%). This bias towards hydrophilic residues and small residues which can provide main-chain flexibility probably reflects the evolution of surfaces which are predisposed to binding a wide range of antigens or epitopes and may help to explain the required promiscuity of antibodies in the primary repertoire.

[0342] Since it is preferable to mimic this distribution of amino acids, the distribution of amino acids at the positions to be varied preferably mimics that seen in the antigen binding site of antibodies. Such bias in the substitution of amino acids that permits selection of certain polypeptides (not just antibody polypeptides) against a range of target antigens is easily applied to any polypeptide repertoire. There are various methods for biasing the amino acid distribution at the position to be varied (including the use of tri-nucleotide mutagenesis, see WO97/08320), of which the preferred method, due to ease of synthesis, is the use of conventional degenerate codons. By comparing the amino acid profile encoded by all combinations of degenerate codons (with single, double, triple and quadruple degeneracy in equal ratios at each position) with the natural amino acid used it is possible to calculate the most representative codon. The codons (AGT)(AGC)T, (AGT)(AGC)C and (AGT)(AGO(CT)—that is, DVT, DVC and DVY, respectively using IUPAC nomenclature—are those closest to the desired amino acid profile: they encode 22% serine and 11% tyrosine, asparagine, glycine, alanine, aspartate, threonine and cysteine. Preferably, therefore, libraries are constructed using either the DVT, DVC or DVY codon at each of the diversified positions.

### Therapeutic and Diagnostic Compositions and Uses

[0343] The invention provides compositions comprising the ligands of the invention and a pharmaceutically acceptable carrier, diluent or excipient, and therapeutic and diagnostic methods that employ the ligands or compositions of the invention. The ligands according to the method of the present invention may be employed in in vivo therapeutic and prophylactic applications, in vivo diagnostic applications and the like.

[0344] Therapeutic and prophylactic uses of ligands of the invention involve the administration of ligands according to the invention to a recipient mammal, such as a human. The ligands bind to targets with high affinity and/or avidity. In some embodiments, such as IgG-like ligands, the ligands can allow recruitment of cytotoxic cells to mediate killing of cancer cells, for example by antibody dependent cellular cytoxicity.

[0345] Substantially pure ligands of at least 90 to 95% homogeneity are preferred for administration to a mammal, and 98 to 99% or more homogeneity is most preferred for pharmaceutical uses, especially when the mammal is a human. Once purified, partially or to homogeneity as desired, the ligands may be used diagnostically or therapeutically (including extracorporeally) or in developing and performing assay procedures, immunofluorescent stainings and the like (Lefkovite and Pernis, (1979 and 1981) Immunological Methods, Volumes I and II, Academic Press, NY).

[0346] In the instant application, the term “prevention” involves administration of the protective composition prior to the induction of the disease. “Suppression” refers to administration of the composition after an inductive event, but prior to the clinical appearance of the disease, “Treatment” involves administration of the protective composition after disease symptoms become manifest. Treatment includes ameliorating symptoms associated with the disease, and also preventing or delaying the onset of the disease and also lessening the severity or frequency of symptoms of the disease.

[0347] For example, the ligands, of the present invention will typically find use in preventing, suppressing or treating disease states. For example, ligands can be administered to treat, suppress or prevent a chronic inflammatory disease, allergic hypersensitivity, cancer, bacterial or viral infection, autoimmune disorders (which include, but are not limited to, Type I diabetes, asthma, multiple sclerosis, rheumatoid arthritis, juvenile rheumatoid arthritis, psoriatic arthritis, spondylarthropathy (e.g., ankylosing spondylitis), systemic lupus erythematosus, inflammatory bowel disease (e.g., Crohn's disease, ulcerative colitis), myasthenia gravis and Behcet's syndrome, psoriasis, endometriosis, and abdominal adhesions (e.g., post abdominal surgery).

[0348] The ligands of the invention may be used to treat, suppress or prevent disease, such as an allergic disease, a Th2-mediated disease, IL-13-mediated disease, IL-4-mediated disease, and/or IL-4/IL-13-mediated disease. Examples of such diseases include, Hodgkin's disease, asthma, allergic asthma, atopic dermatitis, atopic allergy, ulcerative colitis, scleroderma, allergic rhinitis, COPD, idiopathic pulmonary fibrosis, chronic graft rejection, bleomycin-induced pulmonary fibrosis, radiation-induced pulmonary fibrosis, pulmonary granuloma, progressive systemic sclerosis, schistosomiasis, hepatic fibrosis, renal cancer, Burkitt lymphoma, Hodgkins disease, non-Hodgkins disease, Sezary syndrome, asthma, septic arthritis, dermatitis herpetiformis, chronic idiopathic urticaria, ulcerative colitis, scleroderma, hypertrophic scarring, Whipple's Disease, benign prostate hyperplasia, a lung disorder in which IL-4 receptor plays a role, condition in which IL-4 receptor-mediated epithelial barrier disruption plays a role, a disorder of the digestive system in which IL-4 receptor plays a role, an allergic reaction to a medication, Kawasaki disease, sickle cell disease, Churg-Strauss syndrome, Grave's disease, pre-eclampsia, Sjogren's syndrome, autoimmune lymphoproliferative syndrome, autoimmune hemolytic anemia, Barrett's esophagus, autoimmune uveitis, tuberculosis, cystic fibrosis, allergic bronchopulmonary mycosis, chronic obstructive pulmonary disease, bleomycin-induced pneumopathy and fibrosis, pulmonary alveolar proteinosis, adult respiratory distress syndrome, sarcoidosis, hyper IgE syndrome, idiopathic hypereosinophil syndrome, an autoimmune blistering disease, pemphigus vulgaris, bullous pemphigoid, myasthenia gravis, chronic fatigue syndrome, nephrosis).

[0349] The term “allergic disease” refers to a pathological condition in which a patient is hypersensitized to and mounts an immunologic reaction against a substance that is normally nonimmunogenic. Allergic disease is generally characterized by activation of mast cells by IgE resulting in an inflammatory response (e.g., local response, systemic response) that can result in symptoms as benign as a runny nose, to life-threatening anaphylactic shock and death. Examples of allergic disease include, but are not limited to, allergic rhinitis (e.g., hay fever), asthma (e.g., allergic asthma), allergic dermatitis (e.g., eczema), contact dermatitis, food allergy and urticaria (hives).

[0350] As used herein “Th2-mediated disease” refers to a disease in which pathology is produced (in whole or in part) by an immune response (Th2-type immune response) that is regulated by CD4⁺ Th2 T lymphocytes, which characteristically produce IL-4, IL-5, IL-10 and IL-13. A Th2-type immune response is associated with the production of certain cytokines (e.g., IL-4, IL-13) and of certain classes of antibodies (e.g., IgE), and is associate with humor immunity. Th2-meidated diseases are characterized by the presence of elevated levels of Th2 cytokines (e.g., IL-4, IL-13) and/or certain classes of antibodies (e.g., IgE) and include, for example, allergic disease (e.g., allergic rhinitis, atopic dermatitis, asthma (e.g., atopic asthma), allergic airways disease (AAD), anaphylactic shock, conjunctivitis), autoimmune disorders associated with elevated levels of IL-4 and/or IL-13 (e.g., rheumatoid arthritis, host-versus-graft disease, renal disease (e.g., nephritic syndrome, lupus nephritis)), and infections associated with elevated levels of IL-4 and/or IL-13 (e.g., viral, parasitic, fungal (e.g., C. albicans) infection).

[0351] Certain cancers are associated with elevated levels of IL-4 and/or IL-13 or associated with IL-4-induced and/or IL-13-induced cancer cell proliferation (e.g., B cell lymphoma, T cell lymphoma, multiple myeloma, head and neck cancer, breast cancer and ovarian cancer). These cancers can be treated, suppressed or prevented using the ligand of the invention.

[0352] Generally, the present ligands will be utilized in purified form together with pharmacologically appropriate carriers. Typically, these carriers include aqueous or alcoholic/aqueous solutions, emulsions or suspensions, and include saline and/or buffered media. Parenteral vehicles include sodium chloride solution, Ringer's dextrose, dextrose and sodium chloride and lactated Ringer's. Suitable physiologically-acceptable adjuvants, if necessary to keep a polypeptide complex in suspension, may be chosen from thickeners such as carboxymethylcellulose, polyvinylpyrrolidone, gelatin and alginates.

[0353] Intravenous vehicles include fluid and nutrient replenishers and electrolyte replenishers, such as those based on Ringer's dextrose. Preservatives and other additives, such as antimicrobials, antioxidants, chelating agents and inert gases, may also be present (Mack (1982) Remington's Pharmaceutical Sciences, 16th Edition). A variety of suitable formulations can be used, including extended release formulations.

[0354] The ligand of the present invention may be used as separately administered compositions or in conjunction with other agents. The ligands can be used in combination therapy with existing IL-13 therapeutics (e.g., existing IL-13 agents (for example, anti-IL-13Rα1, IL-4/13 Trap, anti-IL-13) plus IL-4 dAb, and existing IL-4 agents (for example, anti-IL-4R, IL-4 Mutein, IL-4/13 Trap) plus IL-13 dAb) and IL-13 and IL-4 antibodies (for example, WO05/0076990 (CAT), WO03/092610 (Regeneron), WO00/64944 (Genetic Inst.) and WO2005/062967 (Tanox)). The ligands can be administered and or formulated together with one or more additional therapeutic or active agents. When a ligand is administered with an additional therapeutic agent, the ligand can be administered before, simultaneously with or subsequent to administration of the additional agent. Generally, the ligand and additional agent are administered in a manner that provides an overlap of therapeutic effect. Additional agents that can be administered or formulated with the ligand of the invention include, for example, various immunotherapeutic drugs, such as cylcosporine, methotrexate, adriamycin or cisplatinum, antibiotics, antimycotics, anti-viral agents and immunotoxins. For example, when the antagonist is administered to prevent, suppress or treat lung inflammation or a respiratory disease (e.g., asthma), it can be administered in conjunction with phosphodiesterase inhibitors (e.g., inhibitors of phosphodiesterase 4), bronchodilators (e.g., beta2-agonists, anticholinergerics, theophylline), short-acting beta-agonists (e.g., albuterol, salbutamol, bambuterol, fenoterol, isoetherine, isoproterenol, levalbuterol, metaproterenol, pirbuterol, terbutaline and tornlate), long-acting beta-agonists (e.g., formoterol and salmeterol), short acting anticholinergics (e.g., ipratropium bromide and oxitropium bromide), long-acting anticholinergics (e.g., tiotropium), theophylline (e.g. short acting formulation, long acting formulation), inhaled steroids (e.g., beclomethasone, beclometasone, budesonide, flunisolide, fluticasone propionate and triamcinolone), oral steroids (e.g., methylprednisolone, prednisolone, prednisolon and prednisone), combined short-acting beta-agonists with anticholinergics albuterol/salbutamol/ipratopium, and fenoterol/ipratopium), combined long-acting beta-agonists with inhaled steroids (e.g., salmeterol/fluticasone, and formoterol/budesonide) and mucolytic agents (e.g., erdosteine, acetylcysteine, bromheksin, carbocysteine, guiafenesin and iodinated glycerol.

[0355] Other suitable co-therapeutic agents that can be administered with a ligand of the invention to prevent, suppress or treat asthma (e.g., allergic asthma), include a corticosteroid (e.g., beclomethasone, budesonide, fluticasone), cromoglycate, nedocromil, beta-agonist (e.g., salbutamol, terbutaline, bambuterol, fenoterol, reproterol, tolubuterol, salmeterol, fomtero), zafirlukast, salmeterol, prednisone, prednisolone, theophylline, zileutron, montelukast, and leukotriene modifiers.

[0356] The ligands of the invention can be coadministered with a variety of co-therapeutic agents suitable for treating diseases (e.g., a Th-2 mediated disease, IL-4-mediated disease, IL-13-mediated disease, IL-4 and IL-13-mediated disease, cancer), including cytokines, analgesics/antipyretics, antiemetics, and chemotherapeutics.

[0357] Cytokines include, without limitation, a lymphokine, tumor necrosis factors, tumor necrosis factor-like cytokine, lymphotoxin, interferon, macrophage inflammatory protein, granulocyte monocyte colony stimulating factor, interleukin (including, without limitation, interleukin-1, interleukin-2, interleukin-6, interleukin-12, interleukin-15, interleukin-18), growth factors, which include, without limitation, (e.g., growth hormone, insulin-like growth factor 1 and 2 (IGF-1 and IGF-2), granulocyte colony stimulating factor (GCSF), platelet derived growth factor (PGDF), epidermal growth factor (EGF), and agents for erythropoiesis stimulation, e.g., recombinant human erythropoietin (Epoetin alfa), EPO, a hormonal agonist, hormonal antagonists (e.g., flutamide, tamoxifen, leuprolide acetate (LUPRON)), and steroids (e.g., dexamethasone, retinoid, betamethasone, cortisol, cortisone, prednisone, dehydrotestosterone, glucocorticoid, mineralocorticoid, estrogen, testosterone, progestin).

[0358] Analgesics/antipyretics can include, without limitation, (e.g., aspirin, acetaminophen, ibuprofen, naproxen sodium, buprenorphine hydrochloride, propoxyphene hydrochloride, propoxyphene napsylate, meperidine hydrochloride, hydromorphone hydrochloride, morphine sulfate, oxycodone hydrochloride, codeine phosphate, dihydrocodeine bitartrate, pentazocine hydrochloride, hydrocodone bitartrate, levorphanol tartrate, diflunisal, trolamine salicylate, nalbuphine hydrochloride, mefenamic acid, butorphanol tartrate, choline salicylate, butalbital, phenyltoloxamine citrate, diphenhydramine citrate, methotrimeprazine, cinnamedrine hydrochloride, meprobamate, and the like).

[0359] Antiemetics can also be coadministered to prevent or treat nausea and vomiting, e.g., suitable antiemetics include meclizine hydrochloride, nabilone, prochlorperazine, dimenhydrinate, promethazine hydrochloride, thiethylperazine, scopolamine, and the like).

[0360] Chemotherapeutic agents, as that term is used herein, include, but are not limited to, for example antimicrotubule agents, (e.g., taxol (paclitaxel)), taxotere (docetaxel); alkylating agents (e.g., cyclophosphamide, carmustine, lomustine, and chlorambucil); cytotoxic antibiotics (e.g., dactinomycin, doxorubicin, mitomycin-C, and bleomycin; antimetabolites (e.g., cytarabine, gemcitatin, methotrexate, and 5-fluorouracil); antimiotics (e.g., vincristine vinca alkaloids (e.g., etoposide, vinblastine, and vincristine)); and others such as cisplatin, dacarbazine, procarbazine, and hydroxyurea; and combinations thereof.

[0361] Pharmaceutical compositions can include “cocktails” of various cytotoxic or other agents in conjunction with ligands of the present invention, or even combinations of ligands according to the present invention having different specificities, such as ligands selected using different target antigens or epitopes, whether or not they are pooled prior to administration.

[0362] The route of administration of pharmaceutical compositions according to the invention may be any suitable route, such as any of those commonly known to those of ordinary skill in the art. For therapy, including without limitation immunotherapy, the ligands of the invention can be administered to any patient in accordance with standard techniques. The administration can be by any appropriate mode, including parenterally, intravenously, intramuscularly, intraperitoneally, transdermally, intrathecally, intraarticularly, via the pulmonary route, or also, appropriately, by direct infusion (e.g., with a catheter). The dosage and frequency of administration will depend on the age, sex and condition of the patient, concurrent administration of other drugs, counterindications and other parameters to be taken into account by the clinician. Administration can be local (e.g., local delivery to the lung by pulmonary administration, (e.g., intranasal administration) or local injection directly into a tumor) or systemic as indicated.

[0363] The ligands of this invention can be lyophilised for storage and reconstituted in a suitable carrier prior to use. This technique has been shown to be effective with conventional immunoglobulins and art-known lyophilisation and reconstitution techniques can be employed. It will be appreciated by those skilled in the art that lyophilisation and reconstitution can lead to varying degrees of antibody activity loss (e.g. with conventional immunoglobulins, IgM antibodies tend to have greater activity loss than IgG antibodies) and that use levels may have to be adjusted upward to compensate.

[0364] The compositions containing the ligands can be administered for prophylactic and/or therapeutic treatments. In certain therapeutic applications, an adequate amount to accomplish at least partial inhibition, suppression, modulation, killing, or some other measurable parameter, of a population of selected cells is defined as a “therapeutically-effective dose”. Amounts needed to achieve this dosage will depend upon the severity of the disease and the general state of the patient's health, but generally range from 0.005 to 5.0 mg of ligand per kilogram of body weight, with doses of 0.05 to 2.0 mg/kg/dose being more commonly used. For prophylactic applications, compositions containing the present ligands or cocktails thereof may also be administered in similar or slightly lower dosages, to prevent, inhibit or delay onset of disease (e.g., to sustain remission or quiescence, or to prevent acute phase). The skilled clinician will be able to determine the appropriate dosing interval to treat, suppress or prevent disease. When a ligand is administered to treat, suppress or prevent a disease, it can be administered up to four times per day, twice weekly, once weekly, once every two weeks, once a month, or once every two months, at a dose of for example, about 10 μg/kg to about 80 mg/kg, about 100 μg/kg to about 80 mg/kg, about 1 mg/kg to about 80 mg/kg, about 1 mg/kg to about 70 mg/kg, about 1 mg/kg to about 60 mg/kg, about 1 mg/kg to about 50 mg/kg, about 1 mg/kg to about 40 mg/kg, about 1 mg/kg to about 30 mg/kg, about 1 mg/kg to about 20 mg/kg, about 1 mg/kg to about 10 mg/kg, about 10 μg/kg to about 10 mg/kg, about 10 μg/kg to about 5 mg/kg, about 10 μg/kg to about 2.5 mg/kg, about 1 mg/kg, about 2 mg/kg, about 3 mg/kg, about 4 mg/kg, about 5 mg/kg, about 6 mg/kg, about 7 mg/kg, about 8 mg/kg, about 9 mg/kg or about 10 mg/kg. In particular embodiments, the ligand is administered to treat, suppress or prevent a chronic allergic disease once every two weeks or once a month at a dose of about 10 μg/kg to about 10 mg/kg (e.g., about 10 μg/kg, about 100 μg/kg, about 1 mg/kg, about 2 mg/kg, about 3 mg/kg, about 4 mg/kg, about 5 mg/kg, about 6 mg/kg, about 7 mg/kg, about 8 mg/kg, about 9 mg/kg or about 10 mg/kg.)

[0365] In particular embodiments, the ligand is administered to treat, suppress or prevent asthma each day, every two days, once a week, once every two weeks or once a month at a dose of about 10 μg/kg to about 10 mg/kg (e.g., about 10 μg/kg, about 100 μg/kg, about 1 mg/kg, about 2 mg/kg, about 3 mg/kg, about 4 mg/kg, about 5 mg/kg, about 6 mg/kg, about 7 mg/kg, about 8 mg/kg, about 9 mg/kg or about 10 mg/kg). The ligand can also be administered at a daily dose or unit dose (e.g., to treat, suppress or prevent asthma) at a daily dose or unit dose of about 10 mg, about 9 mg, about 8 mg, about 7 mg, about 6 mg, about 5 mg, about 4 mg, about 3 mg, about 2 mg or about 1 mg.

[0366] In particular embodiments, the ligand of the invention is administered at a dose that provides saturation of IL-4 and/or IL-13 or a desired serum concentration in vivo. The skilled physician can determine appropriate dosing to achieve saturation, for example by titrating ligand and monitoring the amount of free binding sites on IL-4 and/or IL-13 or the serum concentration of ligand. Therapeutic regiments that involve administering a therapeutic agent to achieve target saturation or a desired serum concentration of agent are common in the art.

[0367] Treatment or therapy performed using the compositions described herein is considered “effective” if one or more symptoms are reduced (e.g., by at least 10% or at least one point on a clinical assessment scale), relative to such symptoms present before treatment, or relative to such symptoms in an individual (human or animal model) not treated with such composition or other suitable control. Symptoms will obviously vary depending upon the disease or disorder targeted, but can be measured by an ordinarily skilled clinician or technician. Such symptoms can be measured, for example, by monitoring the level of one or more biochemical indicators of the disease or disorder (e.g., levels of an enzyme or metabolite correlated with the disease, affected cell numbers, etc.), by monitoring physical manifestations (e.g., inflammation, tumor size, etc.), or by an accepted clinical assessment scale, for example; Juniper's Asthma Quality of Life Questionnaire (American Thoracic Society's 32 item assessment evaluates the quality of life with respect to activity limitations, symptoms, emotional function and exposure to environmental stimuli; Juniper, et. al., “Health-related Quality of Life in Moderate Asthma,” Chest, 116:1297-1303 (1999).), the Expanded Disability Status Scale (for multiple sclerosis), the Irvine Inflammatory Bowel Disease Questionnaire (32 point assessment evaluates quality of life with respect to bowel function, systemic symptoms, social function and emotional status—score ranges from 32 to 224, with higher scores indicating a better quality of life), the Quality of Life Rheumatoid Arthritis Scale, or other accepted clinical assessment scale as known in the field. A sustained (e.g., one day or more, preferably longer) reduction in disease or disorder symptoms by at least 10% or by one or more points on a given clinical scale is indicative of “effective” treatment. Similarly, prophylaxis performed using a composition as described herein is “effective” if the onset or severity of one or more symptoms is delayed, reduced or abolished relative to such symptoms in a similar individual (human or animal model) not treated with the composition.

[0368] A composition containing ligands according to the present invention may be utilized in prophylactic and therapeutic settings to aid in the alteration, inactivation, killing or removal of a select target cell population in a mammal. In addition, the ligands and selected repertoires of polypeptides described herein may be used extracorporeally or in vitro selectively to kill, deplete or otherwise effectively remove a target cell population from a heterogeneous collection of cells. Blood from a mammal may be combined extracorporeally with the ligands, e.g. antibodies, cell-surface receptors or binding proteins thereof whereby the undesired cells are killed or otherwise removed from the blood for return to the mammal in accordance with standard techniques.

### EXAMPLES

### Example 1

### General Methods

[0369] For primary selections against human IL-13, libraries of VH dAbs and Vk dAbs were panned against biotinylated human IL-13 protein (R&D systems, Minneapolis, US). The IL-13 was biotinylated using a five fold molar excess of EZ-Link Sulfo-NHS-LC-Biotin reagent (Pierce, Rockford, USA). Round 1 was performed with streptavidin-coated magnetic beads (Dynal, Norway) and either 100 nM or 20 nM antigen; round 2 with neutravidin-coated beads and either 20 nM or 4 nM antigen (Henderikx et al., 2002, Selection of antibodies against biotinylated antigens. Antibody Phage Display: Methods and protocols, Ed. O'Brien and Atkin, Humana Press).

[0370] In the second primary selection, the same VH and Vk dAb phage display libraries were panned while maintaining the antigen concentration at 100 nM, in the final volume of 1 ml PBS, containing 2% Marvel. In the first and third rounds, 4 mg of M280 Streptavidin Dynabeads (Dynal, Norway) were used to capture antigen-phage complexes. In the second round, 4 mg of Neutravidin-coated M270 Carboxy Dynabeads (Dynal, Norway) were used instead.

[0371] M270 Carboxy Dynabeads (Dynal, Norway) were coated with Neutravidin by standard cabodiimined chemistry as follows. 1 ml of Carboxy M-270 Dynabeads (30 mg/ml, 2×10⁶ beads/μl) were washed twice with 1 ml 0.01M NaOH allowing four minutes capture between washes. Sodium hydroxide was removed by two washes with water, followed by activation of the carboxy groups with 1 ml of 40 mg/ml 1-Ethyl-3-[3-dimethylaminopropyl]carbodiimide hydrochloride (EDC) (Sigma, U.K) for 30 minutes at room temperature, with rotational mixing. EDC-activated beads were washed twice with water and 1 ml of 1 mg/ml Neutravidin (Pierce, U.S.A.) in 10 mM 2-Morpholinoethanesulfonic acid (MES, Sigma, U.K.) buffer pH5 was added to the activated beads. The coupling reaction was allowed to proceed with rotation for 30 minutes at room temperature. After coupling, the beads were captured, the unreacted Neutravidin was removed and the unreacted amine-reactive groups on the beads were quenched by incubation with 1 ml of 0.05 M tris(hydroxymethyl)aminomethane (Tris) buffer pH7.4 for fifteen minutes at room temperature. The coated and quenched beads were washed four times in PBS containing 0.1% BSA, resuspended in 1 ml of the same. Sodium azide (Sigma, U.K.) was added to 0.02% for preservation and the beads were stored at 4 C until required.

[0372] The selection process for VH and Vk dAb phage libraries is described in the following tables (Table 1 and 2)

TABLE 1

| | Library | | | | | | | | |
|---|---|---|---|---|---|---|---|---|---|
| | Round 1 | | | Round 2 | | | Round 3 | | |
| | Phage | Phage | Recovery | Phage | Phage | Recovery | Phage | Phage | Recovery |
| Ligand | In | out | % | In | out | % | In | out | % |
| Vk(G4 + G6) | 2.0E+12 | 2.0E+05 | 1.0E−05 | 1.0E+10 | 3.0E+04 | 3.0E−04 | 2.0E+10 | 62E+08 | 3.1 |
| with IL13 | | | | | | | | | |
| Vk(G4 + G6) | | | | | | | 2.0E+10 | 8.0E+06 | 0.04 |
| without IL13 | | | | | | | | | |

TABLE 2

| | Library | | | | | | | | |
|---|---|---|---|---|---|---|---|---|---|
| | Round 1 | | | Round 2 | | | Round 3 | | |
| | Phage | Phage | Recovery | Phage | Phage | Recovery | Phage | Phage | Recovery |
| Ligand | In | out | % | In | out | % | In | out | % |
| VH(G4 + G6) + L | 1.0E+12 | 3.0E+05 | 3.0E−05 | 1.0E+10 | 7.0E+04 | 7.0E−04 | 2.0E+10 | 8.0E+08 | 4 |
| VH(G4 + G6) − L | | | | | | | 2.0E+10 | 5.0E+06 | 0.025 |

[0373] The selected VII (DOM10-236 (SEQ ID NO:1804), DOM10-238 (SEQ ID NO:1805), DOM10-241 (SEQ ID NO:1806), DOM10-245 (SEQ ID NO:1807), DOM10-249 (SEQ ID NO:1808), DOM10-250 (SEQ ID NO:1809), DOM10-251 (SEQ ID NO:1810), DOM10-254 (SEQ ID NO:1811), DOM10-256 (SEQ ID NO:1812), DOM10-259 (SEQ ID NO:1813), DOM10-260 (SEQ ID NO:1814), DOM10-261 (SEQ ID NO:1815), DOM10-263 (SEQ ID NO:1816), DOM10-264 (SEQ ID NO:1817), DOM10-273 (SEQ ID NO:1818), DOM10-278 (SEQ ID NO:1819), DOM10-279 (SEQ ID NO:1820), DOM10-281 (SEQ ID NO:1821), DOM10-282 (SEQ ID NO:1822), DOM10-283 (SEQ ID NO:1823), DOM10-400 (SEQ ID NO:1824), DOM10-401 (SEQ ID NO:1825), DOM10-402 (SEQ ID NO:1826), DOM10-404 (SEQ ID NO:1827), DOM10-406 (SEQ ID NO:1828), DOM10-407 (SEQ ID NO:1829), DOM10-409 (SEQ ID NO:1830), DOM10-410 (SEQ ID NO:1831), DOM10-414 (SEQ ID NO:1832), DOM10-415 (SEQ ID NO:1833), DOM10-416 (SEQ ID NO:1834), DOM10-418 (SEQ ID NO:1835), DOM10-420 (SEQ ID NO:1836), DOM10-422 (SEQ ID NO:1837), DOM10-423 (SEQ ID NO:1838), DOM10-424 (SEQ ID NO:1839), DOM10-425 (SEQ ID NO:1840), DOM10-426 (SEQ ID NO:1841), DOM10-427 (SEQ ID NO:1842), DOM10-428 (SEQ ID NO:1843), DOM10-429 (SEQ ID NO:1844), DOM10-430 (SEQ ID NO:1845), DOM10-431 (SEQ ID NO:1846), DOM10-432 (SEQ ID NO:1847), DOM10-433 (SEQ ID NO:1848), DOM10-467 (SEQ ID NO:1849), DOM10-468 (SEQ ID NO:1850), DOM10-469 (SEQ ID NO:1851), DOM10-470 (SEQ ID NO:1852), DOM10-234 (SEQ ID NO:1853), DOM10-235 (SEQ ID NO:1854), DOM10-237 (SEQ ID NO:1855), DOM10-239 (SEQ ID NO:1856), DOM10-240 (SEQ ID NO:1857), DOM10-242 (SEQ ID NO:1858), DOM10-243 (SEQ ID NO:1859), DOM10-244 (SEQ ID NO:1860), DOM10-246 (SEQ ID NO:1861), DOM10-247 (SEQ ID NO:1862), DOM10-248 (SEQ ID NO:1863), DOM10-252 (SEQ ID NO:1864), DOM10-257 (SEQ ID NO:1865), DOM10-258 (SEQ ID NO:1866), DOM10-262 (SEQ ID NO:1867), DOM10-265 (SEQ ID NO:1868), DOM10-266 (SEQ ID NO:1869), DOM10-274 (SEQ ID NO:1870), DOM10-275 (SEQ ID NO:1871), DOM10-276 (SEQ ID NO:1872), DOM10-277 (SEQ ID NO:1873), DOM10-280 (SEQ ID NO:1874), DOM10-403 (SEQ ID NO:1875), DOM10-405 (SEQ ID NO:1876), DOM10-408 (SEQ ID NO:1877), DOM10-411 (SEQ ID NO:1878), DOM10-412 (SEQ ID NO:1879), DOM10-413 (SEQ ID NO:1880), DOM10-417 (SEQ ID NO:1881), DOM10-419 (SEQ ID NO:1882), DOM10-472 (SEQ ID NO:1883)) and Vk (DOM10-203 (SEQ ID NO:1884), DOM10-205 (SEQ ID NO:1885), DOM10-208 (SEQ ID NO:1886), DOM10-218 (SEQ ID NO:1887), DOM10-219 (SEQ ID NO:1888), DOM10-220 (SEQ ID NO:1889), DOM10-225 (SEQ ID NO:1890), DOM10-228 (SEQ ID NO:1891), DOM10-229 (SEQ ID NO:1892), DOM10-230 (SEQ ID NO:1893), DOM10-231 (SEQ ID NO:1894), DOM10-268 (SEQ ID NO:1895), DOM10-201 (SEQ ID NO:1896), DOM10-202 (SEQ ID NO:1897), DOM10-204 (SEQ ID NO:1898), DOM10-206 (SEQ ID NO:1899), DOM10-207 (SEQ ID NO:1900), DOM10-209 (SEQ ID NO:1901), DOM10-210 (SEQ ID NO:1902), DOM10-211 (SEQ ID NO:1903), DOM10-213 (SEQ ID NO:1904), DOM10-214 (SEQ ID NO:1905), DOM10-215 (SEQ ID NO:1906), DOM10-216 (SEQ ID NO:1907), DOM10-217 (SEQ ID NO:1908), DOM10-221 (SEQ ID NO:1909), DOM10-223 (SEQ ID NO:1910), DOM10-224 (SEQ ID NO:1911), DOM10-227 (SEQ ID NO:1912), DOM10-232 (SEQ ID NO:1913), DOM10-53-425 (SEQ ID NO:2018)) domain antibodies were cloned into pDOM5 expression vector for screening by ELISA or BIAcore off-rate analysis.

[0374] For primary selections against human IL-4, libraries of VII dAbs and libraries of Vk dAbs were panned against biotinylated human IL-4 protein (Peprotech, Rocky Hill, USA). The IL-4 was biotinylated as described above. Round 1 was performed with neutravidin-coated magnetic beads (Dynal, Norway) and 100 nM antigen; round 2 with streptavidin-coated beads and 20 nM antigen. Neutravidin-coated beads were prepared by incubating tosylactivated Dyna beads (Dynal, Norway) in 5 mg/ml Immunopure neutravidin biotin-binding protein/0.1 M borate buffer pH9.5 for 16 hours at 37° C., followed by incubation in 0.1% (w/v) BSA/PBS for 5 minutes at 4° C., followed by incubation in 0.1% (w/v) BSA/0.2 M Tris pH 8.5 for 16 hours at 4° C. Elution at each stage was with 1 mg/ml trypsin-PBS.

[0375] For affinity maturation selections, the above method was used but with the following modifications: two to four rounds of selection were performed using streptavidin-coated beads and decreasing concentrations of antigen (in the range of 1 nM to 50 pM), Phage vector from selection outputs (rounds 2 and 3) was isolated by plasmid prep (Qiagen) and dAb insert released by restriction digest with Sal I and Not I. This insert was ligated into Sal I/Not I cut pDOM5 and used to transform E. coli strain HB2151 for soluble expression and screening of dAbs.

[0376] pDOM5 is a pUC119-based expression vector under control of the LacZ promoter. Expression of dAbs into the supernatant was ensured by fusion to the universal GAS leader signal peptide at the N-terminal end. In addition, a myc-tag was appended at the C-terminal end of the dAbs. After transformation of E. coli HB2151 cells, colonies were used to inoculate 50 to 500 mL of Terrific Broth medium supplemented with carbenicillin (100 μg per mL). Induction was performed with the OVERNIGHT EXPRESS™ SYSTEM 1 (high-level protein expression system, Novagen) according to the manufacturer's instructions. The cultures were incubated at 30° C. for 24-48 hours with shaking at 250 rpm. After cell pelleting by centrifugation (4,000 rpm for 20 min), the supernatants were filtered using a 0.45 μm filter and incubated overnight at 4° C. with Streamline-protein A beads (Arnersham Biosciences, binding capacity: 5 mg of dAb per mL of beads) for the V_{H} dAbs, or Protein L-sepharose beads (Affitech, binding capacity: 2 mg of dAb per mL of beads) for the V_{L}, dAbs. The beads were then packed into drip columns, washed with 10 column volumes of PBS, and bound dAbs were eluted in 0.1 M glycine-HCl, pH 2.0 or 3.0 for the V_{H} and V_{L}, dAbs, respectively. After neutralisation with 1 M Tris-HCl, pH 8.0, the protein samples were dialyzed in PBS and concentrated on Vivaspin 5-kDa concentrators (Vivascience) before storage at 4° C. Protein purity was estimated by visual analysis after SDS-PAGE on 12% acrylamide Tris-glycine gel (Invitrogen). Protein concentrations and yields (in mg per L of bacterial culture) were measured at 280 nm, using extinction coefficients calculated from the amino acid compositions.

### Affinity Maturation Using Phage Libraries

[0377] Maturation was performed using error prone mutagenesis, site-directed mutagenesis of multiple residues and single residue screening technologies. For error-prone maturation libraries, plasmid DNA encoding the dAb to be matured was amplified by PCR, using the GENEMORPH® II RANDOM MUTAGENESIS KIT (random, unique mutagenesis kit, Stratagene). The product was digested with Sal I and Not I and used in a ligation reaction with cut phage vector pDOM4. For the site-directed mutagenesis and single residue libraries, PCR reactions were performed using degenerate oligonucleotides containing NNK or NNS codons to diversify the required positions in the dAb to be affinity matured. Assembly PCR was then used to generate a full length diversified insert. The insert was digested with Sal I and Not I and used in a ligation reaction with pDOM4 for mutagenesis of multiple residues and pDOM5 for mutagenesis of single residues. The ligation produced by either method was then used to transform E. coli strain TB1 by electroporation and the transformed cells plated on 2×TY agar containing 15 μg/ml tetracycline, yielding library sizes of >1×10⁷ clones.

[0378] pDOM4, is a derivative of the Fd phage vector in which the gene III signal peptide sequence is replaced with the yeast glycolipid anchored surface protein (GAS) signal peptide. It also contains a e-myc tag between the leader sequence and gene III, which puts the gene III back in frame. This leader sequence functions well both in phage display vectors but also in other prokaryotic expression vectors and can be universally used.

### Affinity Maturation Using Emulsification

### Library Construction.

[0379] One pg of template DNA of either DOM10-176 (SEQ ID NO:1285), DOM9-155 (SEQ ID NO:451), or DOM9-44 (SEQ ID NO:358) Vk dAb was PCR amplified using GENEMORPH II for 35 cycles with the primer set OA16 (ATACCATGGGGTCGACGGACATCCAG; SEQ ID NO:1797) and OA17n (TTCTTTIGCGGCCGCCCGTTTGATTTCCACC; SEQ ID NO:1798), followed by a restriction digest with SalI and NotI. The clean DOM10-176 (SEQ ID NO:1285), DOM9-155 (SEQ ID NO:451), and DOM9-44 (SEQ ID NO:358) fragments were ligated in either of the vectors pIE2aA or pIE7t3T using T4 DNA ligase in 20 μl volume. All vectors are derived from the pIVEX2.2b Nde vector from Roche. 0.5 μl aliquots of the ligation product were amplified in the presence of competitor DNA or real-time PCR on BioRad Mini-Opticon thermal cycler to establish that the number of ligation events exceeded 10⁹ per reaction. The libraries were PCR amplified from the ligation reaction using either SuperTaq and primers AS11 (TTCGCTATTACGCCAGCTGG; SEQ ID NO:1799) and AS17 (CAGTCAGGCACCGTGTATG; SEQ ID NO:1800)(scArc libraries) or Platinum pfx and primers AS12 (AAAGGGGGATGTGCTGCAAG; SEQ ID NO:1801) and AS18 (AACAATGCGCTCATCGTCATC; SEQ ID NO:1802) (Tus libraries). For targeted diversification libraries, oligonucleotides containing NNS codons at the indicated positions were used and the dAb was assembled by overlap PCR. The assembly reaction was PCR amplified with OA16/17n oligonucleotides using PfuUltra DNA polymerase and cloned SalI/NotI in the scArc or Tus in vitro translation (IVT) vectors.

[0380] Ten pg of template DNA of either DOM10-416 (SEQ ID NO:1834), DOM10-273 (SEQ ID NO:1818), DOM10-275 (SEQ ID NO:1871) or DOM10-276 (1872) VH dAb was PCR amplified using GenemorphII for 35 cycles with the primer set AS9 (SEQ ID NO:1916) and AS65 (SEQ ID NO:1917), followed by a restriction digest with SalI and NotI. The clean DOM10-416 (SEQ ID NO:1834), DOM10-273 (DOM10-273), DOM10-275 (SEQ ID NO:1871) or DOM10-276 (SEQ ID NO:1872) fragments were ligated into pIE2a²A vector (SEQ ID:2015), a derivative of pIE2aA with twoArc operators per gene and potentially tetravalent display capability, using T4 DNA ligase in 20 μl volume. 0.5 μl aliquots of the ligation product were amplified using real-time PCR on BioRad Mini-Opticon thermal cycler to establish that the number of ligation events exceeded 10⁹ per reaction.

In vitro Expression and Emulsification.

[0381] The following reaction mixture was used for in vitro transcription/translation of the library of PCR fragments: 1.5 μl 100 mM oxidized glutathione, 2 μl 5 mM Methionine, 0.5 μl DNA (5.0×10⁸ molecules), 10 μl H₂O, 0.25 μl of 50 mg/ml anti-HA mAb 3F10 (used only with scArc), biotinylated antigen at varying concentrations, and 35 μl of EcoPro T7 coupled transcription-translation extract. Immediately after mixing, the extract was added to 0.7 ml of light white mineral oil containing 4.5% (v/v) Span-80 and 0.5% (v/v) Triton X-100. Emulsification was carried out by spinning a magnetic stirrer for 5 min at 2000 rpm in a S ml glass vial. Microscopic analysis of droplet formation confirmed that droplets were ˜2 μm in diameter. The emulsion was incubated for 60 (Tus) to 180 (scArc) min at 25° C. to allow expression and formation of the protein-DNA complex to take place. Breaking of the emulsion was performed by adding 0.25 ml of PBS/1% BSA/biotinylated antigen and 0.5 ml hexane/20% (v/v) mineral oil, followed by brief vortexing and centrifugation for 1 min at 13,000 rpm. After removal of the oil phase, 1 ml of hexane/mineral oil was added and the procedure repeated three times. The last extraction was performed using only hexane.

### Selection and Amplification.

[0382] Selection for binders was performed by incubating the extracted aqueous phase for 30 min in the presence 50-5 nM of biotinylated antigen (See below for exact conditions used per round). If off-rate selections were performed, this incubation was followed by addition of an excess of unbiotinylated antigen, or the parent VH dAb at 1 μM concentration, and incubation in the 5-100 min range. Each emulsion reaction was then divided over 5 wells of a streptavidin coated PCR plate (50 μl/well), incubated for 15 min at 25° C., and washed 4 times with PBS/BSA. Fifty μl of PCR mix containing either OA16/17n primers, PfuUltra buffer, dNTPs, 2.5 u PfuUltra DNA polymerase (Tus) or successive pairs of nested primers, dNTPs, KOD polymerase buffer and 2.5u KOD polymerase (scArc) was added to each well. PCR was performed for 25 (scArc) or 30 (Tus) cycles. For Tus selections, the PCR product was cleaned and digested with SalI/NotI. The fragment was then ligated in pIE7t³T vector and amplified as described in library construction. For scArc, the PCR product was gel purified and used directly for a next round of selection.

### PEGylation Using Aldehyde and NHS Activated PEGs

[0383] Under appropriate conditions, proteins can be specifically PEGylated via the N-terminus using PEG-aldehyde (PEG-ALD). This has the advantage in that the protein does not require any further engineering to introduce a specific amino acid for modification such as cysteine when using PEG-maleimide. Under non-optimized buffer conditions it is still possible for some of the protein to become modified via lysine residues when using PEG-ALD. An alternative method is to use NHS or SPA activated PEGs which react specifically with surface lysine residues.

### Example 2

### Ligands that Bind IL-4

### IL-4 Receptor Binding Assay (RBA)

[0384] A MAXISORP™ plate (high protein binding ELISA plate, Nunc, Denmark) was coated overnight with 0.5 μg/ml recombinant human IL-4R/Fc (R&D Systems, Minneapolis, USA). The wells were washed three times with 0.1% (v/v) Tween 20 in PBS, followed by three washes with PBS, before blocking with 2% (w/v) BSA in PBS. The plates were washed again before the addition of 10 ng/ml biotinylated-IL-4 (R&D Systems) mixed with a dilution series of anti-IL-4 dAbs or IL-4. IL-4 binding was detected with peroxidase labelled anti-biotin antibody (Stratech, Soham, UK) and then developed with TBM substrate (KPL, Gaithersburg, USA). The reaction was stopped by the addition of HCl and the absorbance read at 450 nm. Anti-IL-4 dAb activity caused a decrease in IL-4 binding to the receptor and therefore a decrease in absorbance compared with the IL-4 only control.

### IL-4 Cell Assay

[0385] Isolated dAbs were tested for their ability to inhibit IL-4 induced proliferation in cultured TF-1 cells (ATCC® catalogue no. CRL-2003). Briefly, 40000 TF-1 cells in phenol red free RPMI media (Gibco, Invitrogen Ltd, Paisley, UK) were placed in the well of a tissue culture microtitre plate and mixed with 1 ng/ml final concentration IL-4 (R&D Systems, Minneapolis, USA) and a dilution of the dAb to be tested. The mixture was incubated for 72 hours at 37° C. 5% CO₂. CELLTITER 96® reagent (colorometric reagent for determining viability, Promega, Madison, USA) was then added and the number of cells per well was quantified by measuring the absorbance at 490 nm. Anti-IL-4 dAb activity caused a decrease in cell proliferation and a corresponding lower A₄₉₀ than IL-4 alone.

Competition BIACOR® with Anti IL-4 dAbs

[0386] These experiments were performed on a BIACOR® 3000 instrument, using a streptavidin coated SA chip (surface plasmon resonance system, Biacore) coupled with ˜400 RU of biotinylated IL-4 (R&D Systems). Analytes were passed over the antigen-coated flow-cell, with in-line referencing against a blank flow-cell, at a flow rate of 30 μl/min in HBS-EP running buffer (Biacore). The first dAb was injected, followed immediately by injection of the second dAb using the Biacore's co-inject function. For this experiment dAbs DOM9-44 (SEQ ID NO:358), DOM9-155-1 (SEQ ID NO:452) and DOM9-112-22 (SEQ ID NO:47) were used. This competition protocol can generally be used to assess competition of a test antibody or fragment with a known dAb (or other antibody polypeptide) for binding to IL-4.

### Allergen Induced Cell Proliferation.

[0387] Blood was collected from donors allergic to house dust mite (HDM). Peripheral blood mononuclear cells (PBMC) were then isolated using a Ficoll gradient. Cells were seeded at 4×10⁶/ml in a 96 well plate and stimulated with HDM at 20-50 ug/ml. Anti-IL-4 dAbs were added at 100 nM at the start of the culture (1.4 ug/ml). Cells were incubated for 5 days, with the addition of 3 [H] thymidine for the final 18 hours. Cells were then harvested and proliferation was assessed by determining the amount of 3H incorporated into the cellular DNA.

Primary Selection and Screening for Anti-IL-4 dAbs

[0388] Primary phage selections were performed using the VH and Vk dAb libraries and outputs sub-cloned into the soluble expression vector pDOM5. dAb clones that inhibit binding of IL-4 to IL-4R were identified by supernatant receptor binding assay (RBA). Clones were then expressed, purified by protein A or protein L and tested as a dose-response in the RBA to estimate the potency with which the clones inhibited the binding of IL-4 to IL-4R. Table 3 shows the results for anti-IL-4 dAbs DOM9-44 (SEQ ID NO:358), DOM9-112 (SEQ ID NO:25), and DOM9-155 (SEQ ID NO:451) in such an RBA assay.

TABLE 3

| IL-4 receptor binding assay | |
|---|---|
| dAb | IC50 (nM) |
| DOM9-44 | 122 |
| DOM9-155 | 100 |
| DOM9-112 | 3 |

Affinity Maturation of Anti-IL-4 dAbs

### DOM9-44 Lineage

[0389] The DOM9-44 lineage was affinity matured using in vitro expression and emulsification. Libraries diversifying CDR2 and CDR3 residues were constructed and used in selections against biotinylated IL-4. Output clones were expressed, purified and screened in the IL-4 receptor binding assay (RBA). The most potent dAb from this lineage was DOM9-44-502 (SEQ ID NO:361), which had a potency of 5.5 nM in the IL-4 RBA (Table 4) and 4.5 nM in the IL-4 cell assay (Table 5).

TABLE 4

| IL-4 receptor binding | |
|---|---|
| assay | |
| dAb | IC50 (nM) |
| DOM9-155-25 | |
| Expt. 1 | 0.73 |
| Expt. 2 | 1 |
| average | 0.86 |
| DOM9-44-502 | |
| Expt. 1 | 4.1 |
| Expt. 2 | 3.6 |
| Expt. 3 | 5.5 |
| Expt. 4 | 8.6 |
| average | 5.5 |
| DOM9-112-168 | |
| Expt. 1 | 1.22 |
| Expt. 2 | 0.64 |
| average | 0.9 |
| DOM9-112-210 | |
| Expt n = 8 | 144 pM |

TABLE 5

| IL-4 Induced TF-1 Cell | |
|---|---|
| Proliferation | |
| dAb | ND50 (nM) |
| DOM9-155-25 | |
| Expt. 1 | 0.55 |
| Expt. 2 | 1.1 |
| average | 0.83 |
| DOM9-44-502 | |
| Expt. 1 | 4.5 |
| DOM9-112-210 | |
| Expt n = 8 | 270 pM |

### DOM9-155 Lineage

[0390] The DOM9-155 lineage was affinity matured using in vitro expression and emulsification. The DOM9-155 dAb (SEQ ID NO:451) was PCR amplified under error-prone conditions and ligated into the Tus vector, followed by a second PCR to amplify the IVT cassette. The libraries were then subjected to sequential rounds of selection against biotinylated IL-4. Ten rounds of selection were performed followed by cloning into the expression vector and overnight supernatant expression. Improved clones were identified by screening on the Biacore and were subsequently used as a template for libraries diversifying residues of the CDR1 by NNS mutagenesis. Output clones were expressed, purified and tested in the IL-4 receptor binding assay and the IL-4 cell assay. The most potent dAbs from the DOM9-155 lineage identified using these methods was DOM9-155-25 (SEQ ID NO:466) with an IC50 of 0.86 nM in the RBA (Table 4) and 0.83 nM in the cell assay (Table 5). Further screening of this output identified two additional dAbs with sub nanomolar potencies: DOM9-155-77 (SEQ ID NO: 2393) and DOM9-155-78 (SEQ ID NO: 2394).

### DOM9-112 Lineage

[0391] The DOM9-112 lineage was affinity matured by phage display using an error-prone maturation library, libraries diversifying multiple residues of CDR 1 and 2 libraries diversifying individual residues of the CDR1 and 2. The resulting phage libraries were used in selections against biotinylated IL-4. Outputs were cloned into vector pDOM5 and expression supernatants were screened for improved off-rates compared to the parent. dAbs with improved off-rates were expressed, purified and tested in the IL-4 receptor binding assay (RBA) and cell assay. The most potent dAbs identified using these methods were DOM9-112-155 (SEQ ID NO:118), DOM9-112-168 (SEQ ID NO:131), DOM9-112-174 (SEQ ID NO:137), DOM9-112-199 (SEQ ID NO:162), DOM9-112-200 (SEQ ID NO:163), DOM9-112-202 (SEQ ID NO:165) and DOM9-112-210 (SEQ ID NO:2401) with IC50 values in the range of 0.9 to 3 nM, as measured in the IL-4 RBA (Table 4).

Epitope Mapping of Anti IL-4 dAbs

[0392] To determine the epitope specificity of the anti-IL-4 dAbs, BIACOR® (surface plasmon resonance, Biacore) competition experiments were performed. DOM9-44 (SEQ ID NO:358) dAb was injected over an IL-4 coupled chip, followed by injection of DOM9-155-1 (SEQ ID NO:452) dAb which could not bind to IL-4 after DOM9-44 (SEQ ID NO:358) was bound (FIG. 13). Similarly, DOM9-44 (SEQ ID NO:358) could not bind after DOM9-155-1 (SEQ ID NO:452) was bound. However dAb DOM9-112-22 (SEQ ID NO:47) could bind IL-4 after dAb DOM9-44 (SEQ ID NO:358) was bound and also after dAb 9-155-1 (SEQ ID NO:452) was bound. The results indicated that dAbs DOM9-44 (SEQ ID NO:358) and DOM9-155-1 (SEQ ID NO:452) bound to the same epitope and that DOM9-112-22 (SEQ ID NO:47) bound to a different epitope from DOM9-44 (SEQ ID NO:358) and DOM9-155-1 (SEQ ID NO:452). This competition protocol can generally be used to assess competition (and epitope mapping) of a test antibody or fragment with a known dAb (or other antibody polypeptide) for binding to IL-4.

### Allergen Induced Cell Proliferation.

[0393] PBMC from all allergic donors showed a dose-dependent proliferation when incubated with HDM (house dust mite). The addition of anti-IL-4 dAbs resulted in an inhibition of allergen induced proliferation in the majority of donors. dAb DOM9-44-502 (SEQ ID NO:361) inhibited proliferation of PBMC from 10 out of 12 donors (FIG. 14A), DOM9-155-11 (SEQ ID NO:457) inhibited proliferation of PBMC from 10 out of 12 donors (FIG. 14B) and DOM9-112-22 (SEQ ID NO:47) inhibited proliferation of PBMC from 2 out of 2 donors. The average inhibition in all responding donors was 38%, 34% and 23% inhibition for dAb DOM9-44-502 (SEQ ID NO:361), DOM9-155-11 (SEQ ID NO:457) and DOM9-112-22 (SEQ ID NO:47), respectively. The reason that maximal responses of only 30-40% are observed is most likely because this allergen induced response is not only dependent on IL-4, but is also dependent on other interleukins such as IL-2.

### IL-4 Induced B Cell Proliferation

[0394] Blood was collected from normal blood donors. PBMC were isolated using Ficoll gradient. B cells were then isolated using a negative B cell isolation kit (EasySep Negative isolation kit, Stem Cell Technologies Inc). Purity was in excess of 98% as determined by flow cytometry and staining with CD3, CD4, CD8, CD14, CD14, CD19 and CD23. B cells were then plated at 1×10⁵ cells/well in the presence of IL-4 (10 ng/ml) in plates coated with irradiated CD40 L⁺L cells. Cultures were incubated for 5 days with the addition of 3[H]thymidine for the final 18 hours. Anti-IL-4 dAbs were added at the start of the culture at 10 nM or 100 nM.

Cross-Reactivity with Rhesus and Cynomolgous IL-4.

[0395] A desired requirement of these dAbs would be cross-reactivity with rhesus and cynomolgous IL-4. To that end, DOM9-112-210 (SEQ ID NO:2401), DOM9-155-5 (SEQ ID NO:454), DOM9-155-25 (SEQ ID NO:466), DOM9-155-77 (SEQ ID NO:2393) and DOM9-155-78 (SEQ ID NO:2394) were tested in the TF-1 cell proliferation assay (see above for description in more detail) in which cells are stimulated with human IL-4 (0.5 ng/ml, Peprotech), rhesus IL-4 (0.5 ng/ml, R&D systems) or cynomolgous IL-4 (1:25000 dilution of supernatant containing in-house expressed cynomolgous IL-4). A dose-response of the dAb will determine the ND50 in this set up. A summary of the values obtained is given in the table below (Table 6) and demonstrates cross-reactivity.

TABLE 6

| | Human IL-4 | Rhesus IL-4 | Cyno IL-4 |
|---|---|---|---|
| dAb | (nM) | (nM) | (nM) |
| DOM9-155-5 | 0.3-0.5 | 1.8-2.7 | |
| DOM9-155-77 | 1.1-1.7 | 3.6-5.4 | |
| DOM9-155-78 | 0.5-0.7 | 1.3-2.0 | |
| DOM9-155-25 | 0.75-1.1 | 2.7-4.1 | 2.6-3.8 |
| DOM9-112-210 | 0.27 | 0.4 | 0.6 |

### Example 3

### Ligands that Bind IL-13

### IL-13 Sandwich ELISA

[0396] A MAXISORP™ plate (high protein binding ELISA plate, Nunc, Denmark) was coated overnight with 2.5 μg/ml coating antibody (Module Set, Bender MedSystems, Vienna, Austria), then washed once with 0.05% (v/v) Tween 20 in PBS before blocking with 0.5% (w/v) BSA 0.05% (v/v) Tween 20 in PBS. The plates were washed again before the addition of 25 pg/ml IL-13 (Bender MedSystems) mixed with a dilution series of DOM10 dAb (i.e., an anti-IL-13 dAb) or IL-13. The plates were washed again before binding of IL-13 to the capture antibody was detected using biotin conjugated detection antibody (Module Set, Bender Medsystems), followed by peroxidase labelled Streptavidin (Module Set, Bender MedSystems). The plate was then incubated with TMB substrate (KPL, Gaithersburg, USA), and the reaction was stopped by the addition of HCl and the absorbance read at 450 nm. Anti-IL-13 dAb activity caused a decrease in IL-13 binding and therefore a decrease in absorbance compared with the IL-13 only control.

### IL-13 Receptor Binding Assay (RBA) Using the 8200 Cellular Detection System

[0397] SPHERO™ goat anti-human IgG (H&L) polystyrene particles (0.5% w/v) (goat-anti-human particles, Spherotech, Libertyville, USA) were coated overnight with 20 μg IL-13R alpha 1/Fc chimera or IL-13R alpha 2/Fc chimera (R&D Systems, Minneapolis, USA). The following reagents were then combined in a 384-well black sided clear bottomed FMAT plate (Applied. Biosystems, Foster City, USA): dilution series of DOM-10 dAb or 0.1% (w/v) BSA in PBS; 0.5 μg/ml biotinylated anti-IL-13 antibody (R&D Systems); 0.25 μg/ml STREPTAVIDIN ALEXA FLUOR® 647 conjugate (fluorescent probe, Molecular Probes, Invitrogen Ltd, Paisley, UK); 10 ng/ml recombinant human IL-13 (R&D Systems); and 1:10 dilution of IL-13R2/Fc coated particles. The plate was incubated for seven hours before being read in the 8200 cellular detection system (Applied Biosystems). Binding of IL-13 to the receptor coated particle causes a complex to form which is detected as a fluorescent event by the 8200. Anti-IL-13 dAb activity causes a decrease in IL-13 binding and thus a decrease in fluorescent events compared with the IL-13 only control.

### IL-13 Cell Assay

[0398] Isolated dAbs were tested for their ability to inhibit IL-13 induced proliferation in cultured TF-1 cells (ATCC® catalogue no. CRL-2003). Briefly, 40000 TF-1 cells in phenol red free RPMI media (Gibco, Invitrogen Ltd, Paisley, UK) were placed in the well of a tissue culture microtitre plate and mixed with 5 ng/ml final concentration IL-13 (R&D Systems, Minneapolis, USA) and a dilution of the dAb to be tested. The mixture was incubated for 72 hours at 37° C. 5% CO₂. CELLTITER. 96® reagent (colorometric reagent for determining viability, Promega, Madison, USA) was then added and the number of cells per well was quantified by measuring the absorbance at 490 nm. Anti-IL-13 dAb activity caused a decrease in cell proliferation and a corresponding lower A₄₉₀ than IL-13 alone.

### BIACOR™ Off-Rate Screening

[0399] A streptavidin coated SA chip (Biacore) was coated with approximately 500 RU of biotinylated IL-13 (R&D Systems, Minneapolis, USA). Supernatant containing soluble dAb was diluted 1:5 in running buffer. 50 to 100 ul of the diluted supernatant was injected (kininject) at 50 ul/min flow rate, followed by a 5 minute dissociation phase. Clones with improved off-rates compared to parent were identified by eye, or by measurement using BIAevaluation software v4.1 (Biacore).

Competition BIACOR® With Anti IL-13 dAbs

[0400] These experiments were performed on a BIACOR® 3000 instrument (surface plasmon resonance instrument, Biacore), using a streptavidin coated SA chip (Biacore) coupled with ˜400 RU of biotinylated IL-13 (R&D Systems). Analytes were passed over the antigen-coated flow-cell, with in-line referencing against a blank flow-cell, at a flow rate of 30 μl/min in HBS-EP running buffer (Biacore). The first dAb DOM10-176-535 (SEQ ID NO:1362) was injected, followed immediately by injection of dAb DOM10-53-99 (SEQ ID NO:738), using the Biacore's co-inject function. This competition protocol can generally be used to assess competition of a test antibody or fragment with a known dAb (or other antibody polypeptide) for binding to IL-13.

### Competition and Epitope Mapping

[0401] Epitope Mapping of Anti IL-13 dAbs

[0402] To determine the epitope specificity of the anti-IL-13 dAbs, Biacore competition experiments were performed. dAb DOM10-176-535 (SEQ ID NO:1362) was injected, followed immediately by injection of dAb DOM10-53-99 (SEQ ID NO:738). dAb DOM10-53-99 (SEQ ID NO:738) did not bind to IL-13 to which dAb DOM10-176-535 (SEQ ID NO:1362) has already bound. This indicates that these dAbs bound to the same epitope. This competition protocol can generally be used to assess competition (and epitope mapping) of a test antibody or fragment with a known dAb (or other antibody polypeptide) for binding to IL-13. The epitopes for a second set of dAbs was determined using a slightly modified BIAcore protocol in which first dAbs were injected over an IL-13 surface, then a high affinity binding dAb (DOM10-53-386 (SEQ ID NO:934)) was injected at high concentration (5 μM) saturating the IL-13 surface and finally the dAbs were again injected. If there is a difference between binding prior and post saturation with DOM10-53-386 (SEQ ID NO:934), the epitopes are at least partially overlapping. Using this experimental setup, it was determined that the Vk dAbs DOM10-212 (SEQ ID NO:2016), DOM10-270 (SEQ ID NO:1915), DOM10-213 (SEQ ID NO:1904) and DOM10-215 (SEQ ID NO:1906) share the same epitope as DOM10-53-386 (SEQ ID NO:934), whereas DOM10-208 (SEQ ID NO:1886): and DOM10-224 (SEQ ID NO:1911) have a different epitope. The same BIAcore setup was used for the injection of the Vh dAbs DOM10-416 (SEQ ID NO:1834), DOM10-236 (SEQ ID NO:1804), DOM10-273 (SEQ ID NO:1818), DOM10-275 (SEQ ID NO:1871), DOM10-276 (SEQ ID NO:1872) and DOM10-277 (SEQ ID NO:1873). All these dAbs were shown to have at least partially overlapping epitopes with DOM10-53-386 (SEQ ID NO:934). This demonstrates that less dAb binds once DOM10-53-386 (SEQ ID NO:934) has been injected.

### IL-13 Induced B Cell Proliferation

[0403] Blood was collected from normal blood donors. PBMC were isolated using Ficoll gradient. B cells were then isolated using a negative B cell isolation kit (EasySep Negative isolation kit, Stem Cell Technologies Inc). Purity was in excess of 98% as determined by flowcytometry and staining with CD3, CD4, CD8, CD14, CD19 and CD23. B cells were then plated at 1×10⁵ cells/well in the presence of IL-13 (10 ng/ml) in plates coated with irradiated CD40 L⁺L cells. Cultures were incubated for 5 days with the addition of 3 [H]thymidine for the final 18 hours. Anti-IL-13 dAbs were added at the start of the culture at 10 or 100 nM.

### Formatting:

### Site Specific PEGylation of DOM10-53-343 Using PEG-Maleimide

[0404] The anti-IL13 dAb DOM10-53-343 (SEQ ID NO:891) was engineered with a cysteine at the C-terminus of the protein. Expression and purification of the dAbs was performed as described above. The cysteine engineered dAb was specifically modified with a branched 40K PEG2-MAL to give monomeric modified protein. Other PEG formats are available such as linear PEG-MAL which may also be used to give PEGylated monomers, e.g. 30K or 40K linear PEG.

[chemical structure]

mPEG-MAL formats may be used to PEGylate a monomeric dAb. The PEGs may be of MW from 500 to 60,000 (e.g., from 2,000 to 40,000) in size and either linear or branched in nature
1 ml of 160 μM DOM10-53-343cys was reduced with 5 mM dithiothreitol and left at room temperature for 20 minutes. The sample was then buffer exchanged using a PD-10 column (Amersham Pharmacia), to remove the reducing agent. The column had been pre-equilibrated with 5 mM EDTA, 20 mM BIS-TRIS pH 6.5, 10% glycerol, and the sample applied and eluted following the manufacturer's guidelines. The sample (3.5 ml of ˜50 μM dAb) was then mixed directly with a three fold molar excess of 40K PEG-MAL (˜20 mg). The reaction was left to proceed at room temperature for 3 hours.

### Purification of PEGylated DOM10-53-343 cys Monomer by Anion Exchange

[0405] The sample was further purified using anion exchange chromatography (1 ml Resource Q column), to remove any unreacted PEG and protein. The sample was diluted 3-fold into equilibration buffer (50 mM TRIS pH 8.0), before being applied on to the column which had also been equilibrated in the same buffer. The PEGylated material was separated from the unmodified dAb by running a linear sodium chloride gradient from 0 to 500 mM, in 50 nM TRIS buffer over 20 column volumes. Fractions containing PEGylated dAb only were identified using SDS-PAGE and then pooled.

### N-terminal PEGylation Using 30K PEG-ALD

[0406] The anti-IL13 dAb DOM10-53-338 (SEQ ID NO:886) was PEGylated via the N-terminus (α-amino group) using a 30K PEG-ALD. The dAb was buffer exchanged into 20 mM phosphate buffer pH6.0 to give a final protein concentration of 2 mg/ml (˜166 μM). A 5-fold molar excess of PEG-ALD (830 μM polymer) was added directly to the dAb solution followed by the addition of 2 mM sodium cyanoborohydride to reduce the transient imine linkage to an amine which is stable to hydrolysis. The reaction was then allowed to proceed overnight at room temperature. The sample was further purified using anion exchange chromatography as described above.

### PEGylation of Surface Lysine Residues Using 40K PEG2-NHS

[0407] The anti-IL13 dAb DOM10-53-338 (SEQ ID NO:886) was PEGylated via surface lysine residues using 40K PEG2-NHS. The dAb was buffer exchanged into 20 mM phosphate buffer pH8.0 to give a final protein concentration of 2 mg/ml (˜166 μM). A 5-fold molar excess of PEG-NHS (830 μM polymer) was added directly to the dAb solution and the reaction was allowed to proceed at room temperature overnight. The sample was further purified using anion exchange chromatography as described above.

Primary Selection and Screening for Anti-IL-13 dAbs

[0408] Primary phage selections were performed using VH and Vk dAb libraries and outputs sub-cloned into soluble expression vector pDOM5. dAb clones that inhibit binding of IL-13 to IL-13RI were identified by supernatant RBA. Clones were then expressed, purified by protein A or protein L and tested as a dose-response in the RBA to determine the potency with which the clones inhibited the binding of IL-13 to IL-13RI. Table 7 shows the results for anti-IL-13 dAbs DOM10-53 (SEQ ID NO:651) and DOM10-176 (SEQ ID NO:1285) in such an RBA assay, where their IC₅₀ values are 150 and 100 nM, respectively, while the rest have 1050 values in micromolar range.

TABLE 7
IL-13 receptor I binding assay

| dAb | IC50 (nM) |
|---|---|
| DOM10-53 | 150 |
| DOM10-176 | 100 |
| DOM10-416 | 6000 |
| DOM10-273 | 600 |
| DOM10-275 | 1000 |
| DOM10-276 | 3000 |

Affinity Maturation of Anti-IL-13 dAbs

### DOM10-176 Lineage

[0409] The nucleic acid encoding dAb DOM10-176-535 (SEQ ID NO:1.362) was PCR amplified under error-prone conditions and ligated in the scArc vector, followed by a second PCR to amplify the IVT cassette. The libraries were then subjected to sequential rounds of selection, with antigen concentrations being stepwise decreased from 50 to 5 nM.

[0410] A separate library diversifying positions 52-54 in CDR2 of DOM10-176 (SEQ ID NO:1285) was constructed and used in further selections. The output clones were expressed as supernatants and screened for improved off-rates compared to the parent. dAbs with improved off-rates were expressed, purified and tested in the IL-13 sandwich ELISA and cell assay. The mutations from the best dAbs identified from both of these selections were combined, creating DOM10-176-535 (SEQ ID NO:1362). This was the most potent dAb of the DOM10-176 lineage, with an IC50 value in the RBA in the range of 0.5 nM and a value of 0.77 nM in the IL-13 cell assay (Tables 8 and 9).

TABLE 8
IL-13 assays
IL-13 receptor I binding assay

| DOM10-176-535 | IC50 (nM) |
|---|---|
| Expt. 1 | 0.56 |
| Expt. 2 | 0.76 |
| Expt. 3 | 0.63 |
| Expt. 4 | 0.41 |
| average | 0.59 |

IL-13 sandwich ELISA

| | IC50 (pM) |
|---|---|
| DOM10-53-234 | |
| Expt. 1 | 87 |
| Expt. 2 | 81 |
| Expt. 3 | 87 |
| Expt. 4 | 40 |
| average | 73 |
| DOM10-53-396 | |
| Expt. 1 | 55 |
| Expt. 2 | 30 |
| average | 42 |

TABLE 9
IL-13 Induced TF-1 Cell Proliferation

| | ND50 (nM) |
|---|---|
| DOM10-176-535 | 0.77 |
| DOM10-53 lineage | ND50 (pM) |
| 10-53-234 | 43 |
| 10-53-344 | 100 (n = 2) |

### DOM10-53 Lineage

[0411] The DOM10-53 lineage was affinity matured by phage display using an error-prone maturation library, libraries diversifying multiple residues of CDR 1, 2 and 3 and libraries diversifying individual residues of the CDR1, 2 and 3. The resulting phage libraries were used in selections against biotinylated IL-13. Outputs were cloned into vector pDOM5 and expression supernatants were screened for improved off-rates compared to the parent. dAbs with improved off-rates were expressed, purified and tested in the IL-13 sandwich ELISA and cell assay. The most potent dAbs identified using these methods were DOM10-53-223 (SEQ ID NO:774), DOM10-53-234 (SEQ ID NO:785), DOM10-53-316 (SEQ ID NO:866), DOM10-53-339 (SEQ ID NO:887), DOM10-53-344 (SEQ ID NO:892) and DOM10-53-396 (SEQ ID NO:944), with potency values as estimated in the IL-13 sandwich ELISA and IL-13 cell assay in the range of 100 pM to 40 pM (Table 8 and 9).

### Inhibition of IL-13 Binding to IL-13Rα2

[0412] Anti-IL-13 dAbs were tested for their ability to inhibit binding of IL-13 to IL13Rα2 in a competition assay. Table 10 shows that both DOM10-53-316 (SEQ ID NO:866) and DOM10-176-535 (SEQ ID NO:1362) were able to inhibit the binding of IL-13 to IL13Rα2 with IC50 values of 2 nM and 8 nM respectively.

TABLE 10
IL-13 receptor α2 binding assay

| dAb | IC50 (nM) |
|---|---|
| DOM10-53-316 | 1.2 |
| DOM10-176-535 | 7.9 |

### Binding to Variant IL-13 (R130Q)

[0413] Genetic variants of IL-13 have been associated with an increased risk for asthma (Heinzmann et al. Hum Mol. Genet. (2000) 9549-59) and bronchial hyperresponsiveness (Howard et al., Am. J. Resp. Cell Molec. Biol. (2001) 377-384). Therefore it was determined whether the anti-IL-13 dAbs are able bind variant IL-13 (R130Q), the TF-1 proliferation assay was performed with variant IL-13 (R130Q), and increasing amounts of dAb. Table 11 shows that both DOM10-53-316 (SEQ ID NO:866) and DOM10-176-535 (SEQ ID NO:1362) were able to inhibit variant IL-13 induced TF-1 proliferation with ND50 values of approximately 0.5 nM and 8 nM respectively.

TABLE 11
Variant and human IL-13

| | IC50 (nM) |
|---|---|
| DOM10-53-316 | 1 |
| Human IL-13 | 0.39 |
| Variant IL-13 | 0.52 |
| DOM10-176-535 | |
| Human IL-13 | 6 |
| Variant IL-13 | 7.8 |

Cross-Reactivity with Rhesus and Cynomolgous IL-13.

[0414] A desired requirement of these dAbs would be cross-reactivity with rhesus and cynomolgous IL-13. To that end, DOM10-53-344 (SEQ ID NO:892) and DOM10-53-434 (SEQ ID NO:2053) were tested in the TF-1 cell proliferation assay (see above for description in more detail) in which cells are stimulated with human IL-13 (5 ng/ml, Peprotech), rhesus IL-13 (5 ng/ml, R&D systems) or cynomolgous IL-13 (1:4000 dilution of supernatant containing in-house expressed cynomolgous IL-13). A dose-response of the dAb will determine the ND50 in this set up. A summary of the values obtained are given in the table below (Table 12) and demonstrate cross-reactivity.

TABLE 12

| dAb | Human IL-4 | Rhesus IL-4 | Cyno IL-4 | |
|---|---|---|---|---|
| DOM10-53-344 | 100 pM | n.d. | 980 | pM |
| DOM10-53-434 | 600 pM | 2.8 nM | 5.6 | nM |

### DOM10-416, DOM10-273 DOM10-275 and DOM10-276 Lineages.

[0415] The error-prone PCR libraries of VII dAbs DOM10-416 (SEQ ID NO:1834), DOM10-236 (SEQ ID NO:1804), DOM10-273 (SEQ ID NO:1818), DOM10-275 (SEQ ID NO:1871), DOM10-276 (SEQ ID NO:1872) and DOM10-277 (SEQ ID NO:1873) were prepared and quantified as described above. The rest of the ligation mix was used as a template for the second, regular Taq polymerase (SuperTaq, HT Biotechnology Ltd, Cambridge, UK) catalysed PCR reaction with primers AS11 and AS17 to amplify the IVT cassette. DOM10-275 (SEQ ID NO:1871) and DOM10-276 (SEQ ID NO:1872) were kept separate during the affinity maturation reaction, DOM10-273 (SEQ ID NO:1818) and DOM10-416 (SEQ ID NO:1834) were pooled. The libraries were then subjected to ten rounds of selection. In the first four rounds of selection the antigen concentration was 75 nM, in the next two rounds 60 mM, followed by two rounds at 45 nM and the final two rounds at 30 nM.

[0416] The selection output was cloned into pDOM5 expression vector and the culture supernatants were screened by surface plasmon resonance on BIAcore 1000. A number of clones with improved properties were identified. Surprisingly, the improved clones were mostly characterized not by point mutations from error-prone PCR, but by recombination events between the clones. DOM10-275-1 (SEQ ID NO:1918) comprises the CDR1 and CDR2 of DOM10-275 (SEQ ID NO:1871) and CDR3 of DOM10-273 (SEQ ID NO:1818). DOM10-276-2 (SEQ ID NO:1919) comprises of the CDR1 and CDR3 of DOM10-276 (SEQ ID NO:1872) and CDR2 of DOM10-416 (SEQ ID NO:1834). DOM10-276-2 (SEQ ID NO:1919) comprises of the CDR1 and CDR2 of DOM10-416 (SEQ ID NO:1834) and CDR3 of DOM10-276 (SEQ ID NO:1872). Clones from the error-prone PCR library selection are listed as DOM10-275-1 (SEQ ID NO:1918), DOM10-276-2 (SEQ ID NO:1919), DOM10-276-3 (SEQ ID NO:1920), DOM10-275-3 (SEQ ID NO:1979), DOM10-277-2 (SEQ ID NO:1980), DOM10-277-3 (SEQ ID NO:1981), DOM10-273-1 (SEQ ID NO:1982), DOM10-273-2 (SEQ ID NO:1983), DOM10-275-2 (SEQ ID NO:1984), DOM10-275-4 (SEQ ID NO:1985), DOM10-276-1 (SEQ ID NO:1986), DOM10-276-4 (SEQ ID NO:1987) and DOM10-277-1 (SEQ ID NO:1988)

TABLE 13
IL-13 assays
IL-13 BIAcore binding assay

| DOM10-275-1 | Kd (nM) |
|---|---|
| Expt. 1 | 25 |
| Expt. 2 | 28 |
| average | 27 |
| DOM10-275-1 | IC50 (nM) |

IL-13 receptor I binding assay

| | |
|---|---|
| Expt. 1 | 13 |
| Expt. 2 | 128 |
| average | 70 |

IL-13 sandwich ELISA

| | |
|---|---|
| Expt. 1 | 38 |

IL-13 cell binding assay

| | |
|---|---|
| Expt. 1 | 37 |

Targeted Diversification Libraries of DOM10-273, DOM10-275 and DOM10-276 VH dAbs.

[0417] VH domain antibodies DOM10-273 (SEQ ID NO:1818), DOM10-275 (SEQ ID NO:1871) or DOM10-276 (1872) were also affinity matured by diversification at positions 52, 54, 55, 57 and 59 of CDR2 and at positions 101, 102 and 104 of CDR3. At both CDRs two targeted positions at a time were randomized in all possible combinations. The libraries targeting the same CDR in the respective parent clones were pooled and recombined in framework three by SOE PCR, giving rise to a recombined library with four randomized residues per gene, two in CDR2 and two in CDR3, in all possible combinations surrounding their respective CDR1 regions (calculated diversity at nucleotide level 3×10⁷ different clones), i.e. three libraries in total. The same was repeated by pooling the 5′ and 3′ PCR fragments of all parent clones before the SOE PCR step, creating a library of about 10⁸ theoretical diversity. Finally, the 5′ fragment of DOM10-275 set of libraries encoding CDR1 and CDR2 was recombined with the 3′ set of CDR3 libraries of DOM10-273.

### Targeted Diversification Library 1.

[0418] The CDR2 region of DOM10-273 VII dAb (SEQ ID NO:1818) in pDOM5 vector was diversified in ten PCR reactions using 10 pg of template and SuperTaq DNA polymerase. The following forward primers: AS818 (SEQ ID NO:1921), AS819 (SEQ ID NO:1922), AS820 (SEQ ID NO:1923), AS821 (SEQ ID NO:1924), AS822 (SEQ ID NO:1925), AS823 (SEQ ID NO:1926), AS824 (SEQ ID NO:1927), AS825 (SEQ ID NO:1928), AS826 (SEQ ID NO:1929), AS827 (SEQ ID NO:1930) AS828 (SEQ ID NO:1931) were all used to run PCR amplification reactions using AS339 (SEQ ID NO:1951) as the reverese primer. The reaction products were pooled and gel purified on 2% E-Gel (Invitrogen, USA), forming Fragment Set 1. Fragment Set 1 was thereafter SOE PCR extended with the PCR reaction product formed from the amplification of the same vector construct with AS9 forward primer (SEQ ID NO:1916) and AS829 reverse primer (SEQ ID NO:1932). The SOE PCR comprised of 15 cycles of amplification with SuperTaq DNA polymerase at 50° C. annealing step. The formation of SOE product was verified by gel electrophoresis and a 5 μl aliquot of the reaction was further amplified with primers AS639 (SEQ ID NO:1952) and AS65 (TTGTAAAACGACGGCCAGTG; SEQ ID NO:1917). The CDR3 region of DOM10-273 VH dAb in pDOM5 vector was diversified in three PCR reactions using 10 pg of template and SuperTaq DNA polymerase. The following forward primers: AS830 (SEQ ID NO:1933), AS831 (SEQ ID NO:1934) and AS832 (SEQ ID NO:1935) were each combined with AS339 (CAGGAAACAGCTATGACCATG; SEQ ID NO:1951). The reaction products were pooled and gel purified on 2% E-Gel (Invitrogen, USA), forming Fragment Set 2. Fragment Set 2 was thereafter SOE PCR extended with the PCR reaction product formed from the amplification of the same vector construct with AS9 forward primer (SEQ ID NO:1916) and AS833 reverse primer (SEQ ID NO:1936). The SOE PCR comprised of 15 cycles of amplification with SuperTaq DNA polymerase at 50° C. annealing step. The formation of SOE product was verified by gel electrophoresis and a 5 μl aliquot of the reaction was further amplified with primers AS339 (SEQ ID NO:1951) and AS65 (SEQ ID NO:1917).

[0419] The recombination reaction of CDR2 and CDR3-focused libraries of DOM10-273 (SEQ ID NO:1818), based on Fragment Sets 1 and 2, was performed in framework 3 region. The CDR2-library carrying fragments were generated by PCR amplification of Fragment Set 1 with primers AS639 (SEQ ID NO:1952) and AS660 (SEQ ID NO:1976). The CDR3-library carrying fragment was generated by PCR amplification of Fragment set 2 with primers AS659 (SEQ ID NO:1975) and AS65 (SEQ ID NO:1917), The SOB reaction was carried out as before, except that the extended product was reamplified with primers AS297 (SEQ ID NO:1977) and AS298 (SEQ ID NO:1978). The amplification reaction product was gel purified, cut with Sal I and Not I enzymes, re-purified on 2% E-Gels and then ligated into Sal I/Not 1-cut pIE2a²A vector.

### Targeted Diversification Library 2.

[0420] The CDR2 region of DOM10-275 VH dAb in pDOM5 vector was diversified in ten PCR reactions using 10 pg of template and SuperTaq DNA polymerase. The following forward primers: AS836 (SEQ ID NO:1939), AS837 (SEQ ID NO:1940), AS838 (SEQ ID NO:1941), AS839 (SEQ ID NO:1942), AS840 (SEQ ID NO:1943), AS841 (SEQ ID NO:1944), AS842 (SEQ ID NO:1945), AS843 (SEQ ID NO:1946), AS844 (SEQ ID NO:1947), AS845 (SEQ ID NO:1948) AS846 (SEQ ID NO:1949) were all used to run PCR amplification reactions using AS339 (SEQ ID NO:1951) as the reverese primer. The reaction products were pooled and gel purified on 2% E-Gel (Invitrogen, USA), forming Fragment Set 3. Fragment Set 3 was thereafter SOE PCR extended, as described above, with the PCR reaction product formed from the amplification of the same vector construct with AS9 forward primer (SEQ ID NO:1916) and AS847 reverse primer (SEQ ID NO:1950). The formation of SOB product was verified by gel electrophoresis and a 5 it aliquot of the reaction was further amplified with primers AS65 (SEQ ID NO:1917) and AS639 (SEQ ID NO:1952). The CDR3 region of DOM10-273 VH dAb in pDOM5 vector was diversified in three PCR reactions using 10 pg of template and SuperTaq DNA polymerase. The following forward primers: AS848 (SEQ ID NO:1953), AS849 (SEQ ID NO:1954) and AS850 (SEQ ID NO:1955) were each combined with AS339 (SEQ ID NO:1951). The reaction products were pooled and gel purified on 2% E-Gel (Invitrogen, USA), forming Fragment Set 4. Fragment Set 4 was thereafter SOE, PCR extended with the PCR reaction product formed from the amplification of the same vector construct with AS9 forward primer (SEQ ID NO:1916) and AS851 reverse primer (ATAAGCTTTCGCACAGTAATATAC; SEQ ID NO:1956). The formation of SOB product was verified by gel electrophoresis and a 5 μl aliquot of the reaction was further amplified with primers AS339 (SEQ ID NO:1951) and AS65 (SEQ ID NO:1917).

[0421] The recombination reaction of CDR2 and CDR3-focused libraries of DOM10-275, based on Fragment Sets 3 and 4, was performed in framework 3 of the dAb molecule. The CDR2-library carrying fragments were generated by PCR amplification of Fragment Set 3 with primers AS639 (SEQ ID NO:1952) and AS660 (SEQ ID NO:1976). The CDR3-library carrying fragment was generated by PCR amplification of Fragment set 4 with primers AS659 (SEQ ID NO:1975) and AS65 (SEQ ID NO:1917). The SOE reaction was carried out as above, except that the extended product was reamplified with primers AS297 (SEQ ID NO:1977) and AS298 (SEQ ID NO:1978). The amplification reaction product was gel purified, cut with Sal I and Not I enzymes, re-purified on 2% E-Gels and then ligated into Sal I/Not I-cut pIE2a²A vector.

### Targeted Diversification Library 3.

[0422] The CDR2 region of DOM10-276 VH dAb in pDOM5 vector was diversified in ten PCR reactions using 10 pg of template and SuperTaq DNA polymerase. The following forward primers: AS854 (SEQ ID NO:1959), AS855 (SEQ ID NO:1960), AS856 (SEQ ID NO:1961), AS857 (SEQ ID NO:1962), AS858 (SEQ ID NO:1963), AS859 (SEQ ID NO:1964), AS860 (SEQ ID NO:1965), AS861 (SEQ ID NO:1966), AS862 (SEQ ID NO:1967), AS863 (SEQ ID NO:1968) AS864 (SEQ ID NO:1969) were all used to run PCR amplification reactions using AS339 (SEQ ID NO:1951) as the reverese primer. The reaction products were pooled and gel purified on 2% E-Gel (Invitrogen, USA), forming Fragment Set 5. Fragment Set 5 was thereafter SUE PCR extended, as described above, with the PCR reaction product formed from the amplification of the same vector construct with AS9 forward primer (SEQ ID NO:1916) and AS865 reverse primer (SEQ ID NO:1970). The formation of SOE product was verified by gel electrophoresis and a 5 μl aliquot of the reaction was further amplified with primers AS65 (SEQ ID NO:1917) and AS639 (SEQ ID NO:1952). The CDR3 region of DOM10-273 VH dAb in pDOM5 vector was diversified in three PCR reactions using 10 pg of template and SuperTaq DNA polymerase. The following forward primers: AS866 (SEQ ID NO:1971), AS867 (SEQ ID NO:1972) and AS868 (SEQ ID NO:1973) were each combined with AS339 (SEQ ID NO:1951). The reaction products were pooled and gel purified on 2% E-Gel (Invitrogen, USA), forming Fragment Set 6. Fragment Set 6 was thereafter SOE PCR extended with the PCR reaction product formed from the amplification of the same vector construct with AS9 forward primer (SEQ ID NO:1916) and AS869 reverse primer (ATAAGCTTTCGCACAGTAATATAC; SEQ ID NO:1974). The formation of SOE product was verified by gel electrophoresis and a 5 μl aliquot of the reaction was further amplified with primers AS339 (SEQ ID NO:1951) and AS65 (SEQ ID NO:1917).

[0423] The recombination reaction of CDR2 and CDR3-focused libraries of DOM10-276, based on Fragment Sets 5 and 6, was performed in framework 3 of the dAb molecule. The CDR2-library carrying fragments were generated by PCR amplification of Fragment Set 3 with primers AS639 (SEQ ID NO:1952) and AS660 (SEQ ID NO:1976). The CDR3-library carrying fragment was generated by PCR amplification of Fragment set 4 with primers AS659 (SEQ ID NO:1975) and AS65 (SEQ ID NO:1917). The SOE reaction was carried out as above, except that the extended product was reamplified with primers AS297 (SEQ ID NO:1977) and AS298 (SEQ ID NO:1978). The amplification reaction product was gel purified, cut with Sal I and Not I enzymes, re-purified on 2% E-Gels and then ligated into Sal I/Not I-cut pIE2a²A vector.

### Targeted Diversification Library 4.

[0424] The recombination reaction of all CDR2 and CDR3-focussed libraries across all three VH dAbs DOM10-273 (SEQ ID NO:1818), DOM10-275 (SEQ ID NO:1871) and DOM10-276 (SEQ ID NO:1872) was performed in framework 3 of the dAb molecule. The CDR2-library carrying fragments were generated by PCR amplification of libraries made from Fragment Sets 1, 3 and 5 with primers AS639 (SEQ ID NO:1952) and AS660 (SEQ ID NO:1976). The CDR3-library carrying fragment was generated by PCR amplification of libraries made from Fragment Sets 2, 4 and 6 with primers AS659 (SEQ ID NO:1975) and AS65 (SEQ ID NO:1917), The SOE reaction was carried out as before, except that the extended product was reamplified with primers AS297 (SEQ ID NO:1977) and AS298 (SEQ ID NO:1978). The amplification reaction product was gel purified, cut with Sal I and Not I enzymes, re-purified on 2% E-Gels and then ligated into Sal I/Not I-cut pIE2a²A vector.

### Targeted Diversification Library 5.

[0425] The recombination reaction of all CDR2-focused library of DOM10-273 (SEQ ID NO:1818) with the CDR3-focused library of DOM10-273 was performed in framework 3 of the dAb molecule. The CDR2-library carrying fragments were generated by PCR amplification of library made from Fragment Set 3 using primers AS639 (SEQ ID NO:1952) and AS660 (SEQ ID NO:1976). The CDR3-library carrying fragment was generated by PCR amplification of libraries made from Fragment Sets 2 using primers AS659 (SEQ ID NO:1975) and AS65 (SEQ ID NO:1917). The SOE reaction was carried out as above, except that the extended product was reamplified with primers AS297 (SEQ ID NO:1977) and AS298 (SEQ ID NO:1978). The amplification reaction product was gel purified, cut with Sal I and Not I enzymes, re-purified on 2% E-Gel and then ligated into Sal I/Not 1-cut pIE2a²A vector.

Selections from Targeted Diversification Libraries of DOM10-273 DOM10-275 and DOM10-276 Lineages.

[0426] Targeted diversification libraries of DOM10-273 (SEQ ID NO:1818), DOM10-275 (SEQ ID NO:1871) and DOM10-276 (SEQ ID NO:1872) lineages were ligated and quantified as described above for the error-prone PCR libraries. The libraries were then subjected to ten rounds of selection. In the first round of selection the antigen concentration was 40 nM, in the second round 20 nM, followed by eight rounds at 10 nM. The competitor dAb DOM10-275-1 (SEQ ID NO:1918) was applied at 1 μM concentration starting from the fourth round of selection for 10, 20, 20, 30, 50, 90 and 90 minutes, after 15-minute equilibration with the antigen. The selection output was cloned into pDOM5 expression vector and the culture supernatants were screened by surface plasmon resonance on BIAcore 1000. A number of clones were identified (for example, DOM10-275-13 (SEQ ID NO:1989), DOM10-275-15 (SEQ ID NO:1990), DOM10-275-20 (SEQ ID NO:1991), DOM10-275-8 (SEQ ID NO:1992), DOM10-276-13 (SEQ ID NO:1993), DOM10-276-14 (SEQ ID NO:1994), DOM10-276-15 (SEQ ID NO:1995), DOM10-276-17 (SEQ ID NO:1996), DOM10-276-7 (SEQ ID NO:1997), DOM10-276-8 (SEQ ID NO:1998), DOM10-275-11 (SEQ ID NO:1999), DOM10-275-12 (SEQ ID NO:2000), DOM10-275-14 (SEQ ID NO:2001), DOM10-275-16 (SEQ ID NO:2002), DOM10-275-17 (SEQ ID NO:2003), DOM10-275-5 (SEQ ID NO:2004), DOM10-275-6 (SEQ ID NO:2005), DOM10-275-7 (SEQ ID NO:2006), DOM10-275-9 (SEQ ID NO:2007), DOM10-276-10 (SEQ ID NO:2008), DOM10-276-11 (SEQ ID NO:2009), DOM10-276-12 (SEQ ID NO:2010), DOM10-276-16 (SEQ ID NO:2011), DOM10-276-5 (SEQ ID NO:2012), DOM10-276-6 (SEQ ID NO:2013), DOM10-276-9 (SEQ ID NO:2014)).

TABLE 14
IL-13 assays
IL-13 BIAcore binding assay

| DOM10-276-15 | Kd (nM) |
|---|---|
| Expt. 1 | 1.5 |
| DOM10-276-15 | IC50 (nM) |

IL-13 sandwich ELISA

| | |
|---|---|
| Expt. 1 | 100 |

IL-13 cell binding assay

| | |
|---|---|
| Expt. 1 | 90 |

Epitope Mapping of Anti-IL-13 dAbs

[0427] To determine the epitope specificity of the anti-IL-13 dAbs, Biacore competition experiments were performed. dAb DOM10-176-535 (SEQ ID NO:1362) was injected, followed immediately by injection of dAb DOM10-53-99 (SEQ ID NO:738). dAb DOM10-53-99 (SEQ ID NO:738) did not bind to IL-13 to which dAb DOM10-176-535 (SEQ ID NO:1362) has already bound. This indicates that these dAbs bound to the same epitope. This competition protocol can generally be used to assess competition (and epitope mapping) of a test antibody or fragment with a known dAb (or other antibody polypeptide) for binding to IL-13.

### B Cell Proliferation Assay

[0428] It has been shown previously that CD40L is able to activate cells to be responsive to IL-13. Indeed all donors tested in this study showed a dose-dependent proliferation when their B cells were incubated with irradiated CD40L⁺L cells and increasing concentrations of IL-13. As negative controls B cells alone or CD40L transfected L cells alone were used. The addition of anti-IL-13 dAbs DOM10-53-338 (SEQ ID NO:886) and DOM10-176-535 (SEQ ID NO:1362) resulted in an inhibition of IL-13 induced proliferation of B cells from all donors (FIG. 15). With both dAbs DOM10-53-338 (SEQ ID NO:886) and DOM10-176-535 (SEQ ID NO:1362) the average inhibition was 80% and 100% at concentrations of 10 nM and 100 nM respectively. Complete inhibition of the B cell proliferation was also observed with 3 μg/ml of positive control anti-IL 13 mAb (R&D). Control dAbs that did not bind IL-13 failed to inhibit this B cell proliferation.

### PEGylated Monomer

[0429] The anti-IL13 dAb DOM10-53-338 (SEQ ID NO:886) was PEGylated via the N-terminus using a 30K aldehyde PEG moiety or via surface lysines using the 40K PEG2-activated moiety. The anti-IL13 dAbs DOM10-53-343 (SEQ ID NO:891) was also cloned with a cysteine at the C-terminus of the protein. This molecule was PEGylated via the C terminus using PEG-Maleimide with a branched 40K PEG2-MAL moiety. To determine the effect of PEGylation the PEGylated DOM10-53-338 dAbs were tested for their ability to inhibit IL-13 binding in the IL-13 receptor binding assay and to inhibit IL-13 induced TF-1 cell proliferation. The potency of both the 30K PEGylated DOM10-53-338 dAb and the 40K PEGylated DOM10-53-338 dAb was maintained in the IL-13 receptor binding assay (Table 15) and in the IL-13 induced TF-1 cell proliferation assay (Table 15). To determine the effect of C-terminal PEGylation, the PEGylated (40K PEG2-MAL) DOM10-53-343 dAbs were tested for their ability to inhibit IL-13 binding in the IL-13 receptor binding assay (Table 15). The potency of the C-terminal PEGylated DOM10-53-343 dAb was slightly improved compared to the native DOM10-53-343 dAb in the IL-13 receptor binding assay.

TABLE 15
PEGylated anti IL-13 dAbs

| | IC50 (pM) |
|---|---|
| IL-13 receptor I binding assay | |
| DOM10-53-338 | 387 |
| DOM10-53-338 30K PEG ALD | 169 |
| DOM10-53-338 40K PEG2 NHS | 226 |
| IL-13 induced TF-1 proliferation | |
| DOM10-53-338 | 423 |
| DOM10-53-338 30K PEG ALD | 181 |
| DOM10-53-338 40K PEG2 NHS | 231 |
| IL-13 receptor I binding assay | |
| DOM10-53-343 | 136 |
| DOM10-53-343 40K PEG2 MAL | 33 |

Biophysical Properties of Anti-IL-13 dAbs

[0430] In order to develop a product for pulmonary delivery it is desired that the molecule has good biophysical properties. Poor chemical stability and physical stability may reduce the biological activity. Pulmonary delivered proteins may be exposed to additional stress e.g shearing forces and increased temperatures in the nebulising device. The lungs can metabolise some of the delivered dose and in some disease indications high levels of proteases can be present that can affect the biological activity. To this end we investigated the solution state by Multi. Angle Light Scattering (MALS) and the melting temperature as determined by differential scanning calorimetry (DSC) of the DOM10-53 lineage molecules.

### SEC MALLS (Multi Angle LASER Light Scattering)

[0431] The in-solution properties of dAb proteins were determined by an initial separation on SEC (size exclusion chromatography; TSKgel G2000/3000SWXL, Tosoh Biosciences, Germany; BioSep-SEC-S2000/3000, Phenomenex, CA, USA) and subsequent on-line detection of eluting proteinaceous material by UV (Abs280 nm), RI (refractive index) and light scattering (laser at 685 nm). The proteins were at an initial concentration of 0.5-1 mg/mL, as determined by absorbance at 280 nm, and visually inspected for impurities by SDS-PAGE. The homogeneity of samples to be injected was usually >90%. 100 uL were injected onto the SEC column. The protein separation on SEC was performed at 0.5 mL/min for 45 minutes. PBS (phosphate buffered saline ±10% EtOH) was used as mobile phase. The ASTRA software (Wyatt Inc; CA; USA) integrated the signals of all three detectors and allowed for the determination of the molar masses in kDa of proteins from ‘first physical principles’. Self-association of proteins could reliably be determined as shown by orthogonal methods (i.e. AUC) for some characteristic dAbs. Inter-run variations and data quality was assessed by running a positive control of known in-solution state with every sample batch. For some DOM10-53 clones no reliable solution state could be assigned because the molecules bound aspecifically to the column matrix or could not be resolved using the size exclusion column. For those cases when the solution state was reliable (i.e. DOM10-53 (SEQ ID NO: 651), DOM10-53-531 (SEQ ID NO:2097), and DOM10-53-612 (SEQ ID NO:2044)) it was shown that the DOM10-53 (SEQ ID NO:651) molecule is mostly a monomer in solution.

### DSC (Differential Scanning Calorimetry)

[0432] Proteins were dialysed overnight into PBS buffer (phosphate buffered saline), diluted and filtered to yield a concentration of 0.5 mg/ml in PBS, as determined by absorbance at 280 nm. PBS buffer was used as a reference for all samples. DSC was performed using capillary cell microcalorimeter VP-DSC (Microcal, MA, USA), at a heating rate of 180° C./hour. A typical scan usually was from 25-90° C. for both the reference buffer and the protein sample. After each reference buffer and sample pair, the capillary cell was cleaned with a solution of 1% Decon in water followed by PBS. Resulting data traces were analysed using Origin 7 Microcal software. The DSC trace obtained from the reference buffer was subtracted from the sample trace. The precise molar concentration of the sample was entered into the data analysis routine to yield values for appTm, enthalpy (ΔH) and van't Hoff enthalpy (ΔHv) values. Data usually were fitted to a non-2-state model. The DSC experiments showed that some DOM10-53 molecules (e.g. 10-53-472 (SEQ ID NO:2103) and 10-53-474 (SEQ ID NO:2105)) have higher melting temperatures compared to others (e.g. 10-53-344 and 10-53-434), whilst they maintain their potency. Such properties are indicative of increased stability and are useful for pulmonary delivery.

TABLE 16

| | | | | Potency |
|---|---|---|---|---|
| Molecule | Tm (° C.) | Mw | SEC MALLS | IC50 (pM) |
| 10-53-344 | 52.6/54.2 | — | n.d. | 100 |
| 10-53-434 | 53.4 | 17 kDa/27 kDa | Monomer/dimer | 290 |
| 10-53-531 | 62.7 | 15.5 kDa | Monomer | 340 |
| 10-53 | 62.7 | | Monomer | 100 nM |
| 10-53-612 | 63.6 | | Monomer | 20 nM |
| 10-53-472 | 57.4 | | n.d. | 54 |
| 10-53-474 | 57.5 | | n.d. | n.d. |
| 10-53-475 | 55.3 | | n.d. | 46 |

Determination of the Pharmacokinetics of an Anti-IL-13 dAb delivered via the Pulmonary Route of Administration.

### Test Substance

[0433] DOM10-53-613 (SEQ ID NO: 2022) binds human IL-13, but not murine IL-13. DOM10-53-613 (at 1.2 mg/ml) with an HA tag for detection was diluted in 20 mM sodium citrate pH6.0, 100 mM NaCl. It was warmed from its storage temperature to 37° C. prior to administration. DOM10-53-613 (at 1.2 mg/ml) was administered to 8 week old male BALB/c mice. Animals were lightly anaesthetised and 50 μl of the relevant dAb solution or vehicle dropped gently onto the nares. The animals were held in an upright position for a few seconds while spontaneously breathing in the solution before being allowed to recover and returned to their home cage. Thereafter mice were killed at the following time points at 10 minutes, 1 hour, 2 hours, 4 hours, 8 hours and 16 hours. Serum, lung gavage and lung homogenate were collected from each mouse at each time point. Three mice were sampled at each time point

ELISA to Detect HA Tagged dAbs

[0434] A 96-well Maxisorp (Nunc) assay plate was coated overnight at 4° C. with 100 μl per well of goat polyclonal anti HA tag antibody (Abeam) at 2 μg/ml in carbonate buffer. Wells were washed 3 times with 0.05% tween/PBS and 3 times with PBS. 200 μl per well of 2% BSA in PBS was added to block the plate. Wells were washed and then 100 μl of HA tagged dAb standard or sample was added. Wells were washed and then 100 μl of Protein A-HRP (1:5000 dilution; Amersham) was added to each well. Plates were developed with 100 μl of SureBlue 1-Component TMB MicroWell Peroxidase (KPL, Gaithersburg, USA) solution added to each well, and the plate was left at room temperature until a suitable signal had developed. The reaction was stopped by the addition of HCl and the absorbance was read at 450 nm. Data was plotted in GraphPad and then fitted in WinNonLin using a non-compartmental model.

### Results

[0435] The DOM10-53-613 (SEQ ID NO:2022) levels in the BAL show that the dAbs were delivered efficiently into the lung lumen. A maximum level of 19 μg/ml (˜7 μg in 0.4 ml) can be detected in the BAL at 1 hr. This means that at least 12% (7 μg of 60 μg total delivered) of the delivered dose was delivered in the lung lumen. It is likely that not all material can be recovered using the lavage procedure and this value is an underestimate. The levels in the BAL are maximal at 1 hour and dAbs are cleared with t_{1/2} of 4.4 hrs, resulting in greater than 10-fold reduced concentrations at 16 hours.

[0436] DOM10-53-613 (SEQ ID NO:2022) levels in the lung show maximum levels at 2 hours of 3.4 μg/ml. This means that approximately 5-6% of the delivered dose was present in the lung tissue. The decline of levels in the lung shows a similar pattern as for the BAL. There was a maximum level at 10 minutes followed by a clearance rate with t_{1/2} of approximately 4.7 hours, resulting in greater than 10-fold reduced concentrations at 16 hours.

[0437] DOM10-53-613 (SEQ ID NO:2022) serum levels were detected. Serum levels were at a maximum at 4 hours. At 4 hours a maximum level of 0.73 μg/ml was detected in the serum. This means that ˜1% (0.7 pg of 60 μg delivered) of the delivered material can be detected in the serum.

TABLE 17

| | BAL | LUNG | SERUM |
|---|---|---|---|
| T½ (hr) | 4.4 | 4.7 | 3.5 |
| AUC0-∞ (μg * hr/mL) | 103.2 | 29.7 | 6.6 |
| Clearance (mL/hr/kg) | 29.1 | 101.1 | 455.5 |
| C Max (μg/mL) | 19.0 | 3.4 | 0.7 |
| T Max (hr) | 1 | 0.167 | 4 |

### Example 4

### Ligands that Bind IL-4 and IL-13

### A. Fusion Proteins

### Cloning and Production of Anti-IL-4 and Anti-IL-13 Dual Specificity Dimer

[0438] Nucleic acids encoding the anti-IL-4 dAb DOM9-112 and anti-IL-13 dAb DOM10-53-343 (SEQ ID N10:891) were cloned into a construct that encoded an in-line fusion protein with a C-terminal cysteine. The amino acid sequence AST was present between the two dAbs, this sequence is the natural CH sequence present in natural antibodies. The construct was cloned in the Pichia pastoris vector pPICZα (Invitrogen). Electrocompetent cells (X-33 or KM711-1) were transformed with the construct and transformants were selected on 100 g/ml Zeocin. 500 ml cultures were grown on BMGY media at 30° C., 250 rpm for 24 hrs until the OD₆₀₀ had reached ˜15-20. The cells were then spun down and resuspended in BMMY media (containing 0.5% (v/v) methanol) to induce protein expression. The cultures were maintained at 30° C. with shaking at 250 rpm. At 24 hour intervals the cultures were fed with the following incremental increase in the methanol concentration; 1%, 1.5% and 2% (v/v) using a 50% methanol solution. The cultures were then harvested by centrifugation and the supernatant containing the expressed protein stored at 4° C. until required. The protein was purified from the supernatant using PrA streamline using the standard purification protocol.

[0439] The PrA purified protein was found to contain both dimer and monomer species. Therefore chromatofocusing was used to separate the two proteins. A Mono P 5/20 column was used (GE Healthcare) for the separation, using a pH gradient of 6 to 4. The poly-buffers used were as described by the manufacturer to make the 6 to 4 pH range. The sample was applied at pH6 and the pH gradient generated by using 100% buffer B over 35 column volumes run at 1 ml/min. Dimer containing fractions were identified using SDS-PAGE and pooled for PEGylation.

[0440] The protein was then PEGylated using 40K PEG2-MAL using the method outlined above. This material was purified using anion exchange chromatography up to a purity >95%. The potency of the resulting dual specific ligand (PEGylated DOM9-112 (AST) DOM10-53-344) was determined in an IL-4 RBA (FIG. 16A) and an IL-13RBA (FIG. 16B). The potency of the anti-IL-4 arm of the dual specific ligand (13 nM) was slightly reduced compared with the potency of the dAb DOM9-112 monomer (3.5 nM), whereas the potency of the anti-IL-13 arm was maintained (310 pM for the dual specific ligand vs 230 pM for the dAb monomer).

[0441] The anti-IL-4 and anti-IL-13 dAbs DOM9-112 (SEQ ID NO:25) and DOM10-53-344 (SEQ ID NO:892) were also cloned as an in-line fusion with the amino acid sequence ASTKGPS (SEQ ID NO:1803) present between the two dAbs, this sequence is the start of the CH sequence present in natural antibodies. The potency of the resulting purified dual specific ligand (DOM9-112 (ASTKGPS) DOM10-53-344) was determined in an IL-4 RBA (FIG. 17A) and an IL-13 sandwich ELISA (FIG. 17B). The potency of the anti-IL-4 arm was maintained (1 nM) whereas the potency of the anti-IL-13 arm was only slightly reduced compared with the dAb monomer (40 pM for the dAb monomer vs 120 pM for the dual specific ligand).

Additional Dual Targeting in-Line Fusions for IL-4 and IL-13.

[0442] To further understand the behaviour of dual targeting in-line fusions of IL4 and IL13 binding dAbs, a series of new in-line fusions and in-line fusion libraries were constructed. The DOM10-53 lineage was affinity matured using phage display using libraries diversifying triplet residues of FR1, CDR1, CDR2 and CDR3. The libraries were cloned in a phage vector and displayed as fusion protein to the gene3 protein as an (dAb1 linker dAb2) in-line fusion with dAb1 being DOM9-112-210 (SEQ ID NO: 2401), the linker being amino acid residues ASTKGPS (SEQ ID NO:1803) and dAb2 being the DOM10-53 library. The selection method, subcloning and expression in E coli and screening method were essentially performed as described above, except that in-line fusion constructs were used instead of single dAbs. Outputs were cloned into vector pDOM5 and expression supernatants were screened for improved expression by binding to a protein A coated Biacore chip.

[0443] In-line fusions with improved expression levels were expressed, purified and tested in a IL-13 sandwich ELISA and cell assay. A number of variants were selected (including DOM9-112-210 ASTKGPS-DOM10-53-566). The most potent clones were DOM10-53-531 (SEQ ID NO:2097) and DOM10-53-546 (SEQ ID NO:2110) (see Table 18). Different protein preparations were made from these clones and these were tested in the IL-4 RBA and IL-13 sandwich assay as described above.

TABLE 18

| | Expression level | IL-13 Sanwich | IL-4 RBA |
|---|---|---|---|
| Clone name | (mg/l) | ELISA (EC50 nM) | (IC50 nM) |
| DOM9-112-210- | | | |
| DOM10-53-531 | | | |
| Prep 1 | 9.3 | 1.1/1.9 | 3.5/4.8 |
| Prep 2 | 11.5 | 4.9 | n.d. |
| Prep 3 | 4.5 | 2/2.8 | 13.9 |
| Prep 4 | 10 | 1 | 5.4 |
| DOM9-112-210- | | | |
| DOM10-53-546 | | | |
| Prep 1 | 2.2 | 0.62/0.77 | 4.3 |
| Prep 2 | 7.7 | 1 | 6 |

[0444] Further in-line fusions were constructed by SOE PCR of the DNA fragments encoding a dAb linker which is either ASTKGPS (SEQ ID NO:1803), if the first dAb was a Vh, or TVAAPS (SEQ ID NO:2459) if the first dAb was a Vk. This PCR product was digested with SalI/NotI and ligated in the E. coli expression vector pDOM5. After transformation to MACH1 (Invitrogen) cells, the clones were sequence verified and the in-line fusions were expressed. Expression was done by growing E. coli in 2TY supplemented with Onex media (Novagen) for 2 nights at 30° C., the cells were centrifuged and the supernatant was incubated with either Protein-L or Protein-A resin. After elution from the resin, the quality and quantity of produced in-line fusion product was verified on SDS-PAGE. The vast majority of product formed had the molecular mass of an in-line fusion with only limited free monomer. Therefore, no additional purification steps were required and the material could be tested directly.

[0445] Using the above described method the following IL-4/IL-13 in-line fusions were expressed, purified and characterised:

### DOM9-112-210-ASTKGPS-DOM10-208

### DOM9-112-210-ASTKGPS DOM10-212

### DOM9-112-210 ASTKGPS DOM10-213

### DOM9-112-210 ASTKGPS DOM10-215

### DOM9-112-210 ASTKGPS DOM10-224

### DOM9-112-210-ASTKGPS DOM10-270

### DOM9-112-210 ASTKGPS-DOM10-416

### DOM9-112-210 ASTKGPS DOM10-236

### DOM9-112-210 ASTKGPS-DOM10-273

### DOM9-112-210 ASTKGPS DOM10-275

### DOM9-112-210 ASTKGPS DOM10-276

### DOM9-112-210 ASTKGPS DOM10-277

### DOM10-208-TVAAPS-DOM9-155-78

### DOM10-212 TVAAPS-DOM9-155-78

### DOM10-213 TVAAPS-DOM9-155-78

### DOM10-215 TVAAPS-DOM9-155-78

### DOM10-224 TVAAPS-DOM9-155-78

### DOM10-270 TVAAPS-DOM9-155-78

### DOM10-416 ASTKGPS-DOM9-155-78

### DOM10-236 ASTKGPS-DOM9-155-78

### DOM10-273 ASTKGPS-DOM9-155-78

### DOM10-275 ASTKGPS-DOM9-155-78

### DOM10-276-ASTKGPS-DOM9-155-78

### DOM10-277 ASTKGPS-DOM9-155-78

[0446] Once purified, the expression levels were determined (mg/l) and the activities were tested in an RBA for IL-4 binding and in a sandwich ELISA for IL-13 binding. The table below (Table 19) summarises the data for these in-line fusions:

TABLE 19

| | | | | | Dom10 | DOM9 |
|---|---|---|---|---|---|---|
| | Expression | | | IL-13 | RBA | RBA |
| clone name | mg/ml | | | Biacore | (EC50 nM) | (IC50 nM) |
| DOM9-112-210-DOM10-208 | 0.3 | 19.2 | 37.4 | ✓ | — | 2.48 |
| DOM9-112-210-DOM10-212 | 3.7 | | 6.3 | ✓ | 999.9 | 3.21 |
| DOM9-112-210-DOM10-213 | 5.6 | 0.2 | 4.9 | ✓ | 1152 | 4.29 |
| DOM9-112-210-DOM10-215 | 0.1 | 8.8 | 2.2 | ✓ | — | 14.19 |
| DOM9-112-210-DOM10-224 | 4.6 | | 13.4 | ✓ | 4575 | 2.75 |
| DOM9-112-210-DOM10-270 | 3.7 | | 2.7 | ✓ | 397.5 | 2.79 |
| DOM9-112-210-DOM10-416 | 6.9 | | 0.0 | ✓ | 34420 | 7.27 |
| DOM9-112-210-DOM10-236 | 0.2 | 0.1 | 2.2 | ✓ | — | >20 |
| DOM9-112-210-DOM10-273 | 1.2 | | 0.3 | ✓ | 4553 | 10.51 |
| DOM9-112-210-DOM10-275 | 4.9 | 0.2 | 0.0 | ✓ | — | 10.89 |
| DOM9-112-210-DOM10-276 | 6.9 | | 0.1 | ✓ | — | 10.20 |
| DOM9-112-210-DOM10-277 | 1.3 | 3.7 | 0.2 | ✓ | 4385 | 11.74 |
| DOM10-208-DOM9-155-78 | | | 41.0 | ✓ | 4243 | 8.18 |
| DOM10-212-DOM9-155-78 | | | 0.5 | ✓ | — | >20 |
| DOM10-213-DOM9-155-78 | | | 16.9 | ✓ | 62.04 | 6.91 |
| DOM10-215-DOM9-155-78 | | | 22.6 | ✓ | 10.82 | 6.65 |
| DOM10-224-DOM9-155-78 | | | 3.6 | ✓ | — | 12.49 |
| DOM10-270-DOM9-155-78 | | | 2.9 | ✓ | 37.23 | 8.60 |
| DOM10-416-DOM9-155-78 | | 1.1 | 26.3 | ✓ | 443.7 | 5.88 |
| DOM10-236-DOM9-155-78 | | 3.6 | 10.8 | ✓ | 372 | 2.54 |
| DOM10-273-DOM9-155-78 | | 6.4 | 16.2 | ✓ | 185.2 | 2.25 |
| DOM10-275-DOM9-155-78 | | 0.2 | 0.0 | — | — | — |
| DOM10-276-DOM9-155-78 | | 0.2 | 20.0 | ✓ | — | 5.02 |
| DOM10-277-DOM9-155-78 | | 1.1 | 1.3 | ✓ | 648 | 9.45 |
| | | | | | DOM9-112 | 3.60 |
| | | | | | DOM9-155-78 | 0.41 |

[0447] Furthermore, an affinity matured variant of DOM10-275 (SEQ ID NO:2196), i.e. DOM10-275-1 (SEQ ID NO:2241), was specifically chosen to be paired with both DOM9-112-210 (SEQ ID NO:2434) and DOM9-155-78 (SEQ ID NO:2427). These in-line fusions were constructed and expressed as described above. In addition to testing in the mentioned IL-4 RBA and IL-13 sandwich ELISA, these in-line fusions were also tested for functionality in a TF-1 cell proliferation assay. In these assays the dAb was preincubated with a fixed amount of either IL-4 or IL-13, this mixture was added to the TF-1 cells and the cells were incubated for 72 hours. After this incubation, the level of cell proliferation was determined. The results of this assay are summarised below (Table 20) and demonstrate that both arms of the in-line fusion were active in the cell assay.

TABLE 20

| | DOM9 | DOM10 | Il-4 | IL-13 |
|---|---|---|---|---|
| | RBA | RBA | cell assay | cell assay |
| Sample | IC50 (nM) | IC50 (nM) | IC50 (nM) | IC50 (nM) |
| DOM9-112-210 | 0.391 | — | | |
| DOM9-155-78 | 0.456 | — | | |
| DOM10-275-1- | 6.238 | 39.17 | 5.1-7.6 | 31-46 |
| DOM9-155-78 | | | | |
| DOM9-112-210- | 4.189 | 44.88 | 6.8-10.2 | 27-40 |
| DOM10-275-1 | | | | |
| DOM10-275-1 | — | 31.30 | | |

### B. IgG-Like Formats

### Cloning, Expression as Dual Specific IgG

[0448] IgG-like formats that bound 11-4 and IL-13 were expressed using the vector pDOM30. This vector is based on the Invitrogen pBudCE4.1 backbone and has been modified to comprise a codon-optimised heavy chain cassette under control of the CMV promoter and a codon-optimised light chain cassette under control of the EF1-alpha promoter. dAbs were cloned into the heavy chain cassette using the BamHI and XhoI restriction sites, and into the light chain cassette using SalI and BsiWI restriction sites. This strategy resulted in native heavy and light chain N-termini and the following variable-constant domain junctions. IgG expression constructs were transformed into chemically competent MachI cells (Invitrogen) grown on low salt LB agar supplemented with 250 μg/L zeocin. For each construct, plasmid DNA was prepared from 3 or 4 randomly picked colonies and dAb sequences were verified using the primers CMV-F (CGCAAATGGGCGGTAGGCGTG) (SEQ ID NO:1795) and pIG(EF1-alpha) (TGAGTGGGTGGAGACTG) (SEQ ID NO:1796). Endotoxin-free plasmid DNA was prepared from 500 mL overnight cultures using the Qiagen endo-free Megaprep kit for verified clones.

[0449] The specificity of the anti-IL-4 and anti-IL-13 specific IgG-like format was assessed in IL-4 receptor RBA, and the IL-13 sandwich ELISA. FIG. 18 shows that the potency of the anti-IL-4 dAb monomer DOM9-44-502 (SEQ ID NO:361) was 3-4 fold reduced when formatted in the IgG-like format (4 nM for the dAb monomer vs. 13 nM for the IgG-like format), whereas the potency of the anti-IL-13 dAb DOM10-176-535 (SEQ ID NO:1362) was 1 nM for both the dAb monomer and the IgG-like format.

Determination of the Pharmacokinetics of [³H]-PEGylated Anti-IL13 dAbs and Anti-IL-4 and anti-IL 13 in-Line Fusions
Radiolabelling of PEGylated Anti-IL13 dAbs and Anti-IL-4 and Anti-IL13 in-Line Fusions.

[0450] Anti-IL 13 dAbs and anti-IL-4 and anti-IL 13 in-line fusions were expressed and PEGylated using the N-terminus (α-amino group) or C-terminus using a 40K branched PEG as described above. The protein was radiolabelled with tritium using N-Succinimidyl[2,3-³H]propionate (NSP) in hexane:ethyl acetate (9:1). 400 μL of NSP was dispensed into a vial and the solvent was removed under a gentle stream of nitrogen at ≦30° C. The residue was then re-suspended in 100 μL of DMSO, 2.5 mL of DOM0910 40K branched PEG was then added to the NSP/DMSO and the mixture was incubated for 60 minutes at room temperature. Following incubation, the solution was loaded onto a PD10 column that was pre-equilibrated with 25 mL of phosphate buffered saline (PBS) and the eluate was discarded. Radiolabelled protein was then eluted off the PD10 column using 3.5 mL of PBS and the eluate was collected. The specific activity of the material was determined (assuming a 100% labelling efficiency and recovery of protein from the PD10 column) and the solution was used immediately or stored at approximately 4° C. until required.

### Animal Work.

[0451] For each molecule, 3 female Spargue-Dawley rats received a single intravenous dose at 1 mg/kg. Serial blood samples were then collected from the tail vein after 2 minutes, 2 hours, 8 hours, 24 hours, 48 hours, 72 hours and 96 hours. The final blood sample was collected after 120 hours immediately prior to sacrifice by cardiac puncture under anaesthetic.

[0452] To obtain serum, blood samples were collected and allowed to clot. Once clotted, samples were centrifuged at 3000 rpm for 10 mins. Serum was then harvested and stored at −20° C. until analysis.

### Determination of Radioactivity.

[0453] The radioactive content of each sample was determined by liquid scintillation counting with automatic quench correction. Serum samples were mixed with PBS prior to addition of scintillation fluid. Disintegration rates from appropriate blank sample vials were subtracted from sample disintegration rates to give net dpm for each sample. Gross radioactivity below twice background level was considered to be below the limit of reliable measurement.

[0454] Additional weighed aliquots of serum obtained after 2 minutes and 48 and 120 hours post dose were lyophilised prior to determination of radioactivity concentration to determine any contribution to total counts from free tritium.

[0455] Data have been fitted using Winonlin fitting software and terminal half life values are determined and described in Table 21. DOM9-112-210 ASTKGPS DOM10-53-612 with N-terminal 40K Branched PEG has a terminal half life of 41 hrs. whereas DOM9-112-210 ASTKGPS DOM10-53-612 with C-terminal 40K Branched PEG has an half life of 32 hrs.

TABLE 21

| | Animal | Animal | Animal | Mean |
|---|---|---|---|---|
| Molecule | #1 | #2 | #3 | (hrs) |
| DOM9-112-210 ASTKGPS | 32.25 | 32.51 | 32.01 | 32.26 |
| DOM10-53-612 C-term 40K | | | | |
| Branched PEG | | | | |
| DOM9-112-210 ASTKGPS | 38.37 | 44.32 | 41.38 | 41.36 |
| DOM10-53-612 N-term 40K | | | | |
| Branched PEG | | | | |
| DOM10-53-612 N-term 40K | 46.06 | 31.39 | 54.35 | 43.93 |
| Branched PEG | | | | |
| DOM10-53-612 C-term 40K | 46.58 | 46.57 | 41.45 | 44.87 |
| Branched PEG | | | | |

[0456] The teachings of all patents, published applications and references cited herein are incorporated by reference in their entirety.

[0457] While this invention has been particularly shown and described with references to example embodiments thereof, it will be understood by those skilled in the art that various changes in form and details may be made therein without departing from the scope of the invention encompassed by the appended claims.

1. A ligand that has binding specificity for interleukin-4 (IL-4) and interleukin-13 (IL-13) comprising.
a protein moiety that has a binding site with binding specificity for IL-4; and
a protein moiety that has a binding site with binding specificity for IL-13, with the proviso that said protein moiety that has a binding site with binding specificity for IL-4 is not an IL-4 receptor or IL-4-binding portion thereof, and said protein moiety that has a binding site with binding specificity for IL-13 is not an IL-13 receptor or IL-13-binding portion thereof.

2. The ligand of claim 1, wherein said protein moiety that has a binding site with binding specificity for IL-4 competes for binding to IL-4 with IL-4Rα, an IL-4-binding portion of IL-4Rα or an anti-IL-4 domain antibody (dAb) selected from the group consisting of DOM9-44-502 (SEQ ID NO:512), DOM9-155-5 (SEQ ID NO:605), DOM9-155-25 (SEQ ID NO:617), DOM9-112-155 (SEQ ID NO:292), DOM9-112-168 (SEQ ID NO:305), DOM9-112-174 (SEQ ID NO:311), DOM9-112-199 (SEQ ID NO:336), DOM9-112-200 (SEQ ID NO:337), DOM9-155-77 (SEQ ID NO:2426), DOM9-155-78 (SEQ ID NO:2427), DOM9-112-202 (SEQ ID NO:339), DOM9-112-209 (SEQ ID NO:2433), DOM9-112-210 (SEQ ID NO:2434) and DOM9-44-502 (SEQ ID NO:512).

3. The ligand of claim 1, wherein said protein moiety that has a binding site with binding specificity for IL-13 competes for binding to IL-13 with IL-13Rα1, an IL-13-binding portion of IL-13Rα1, IL-13Rα2, an IL-13-binding portion of IL-13Rα2, or an anti-IL-13 domain antibody (dAb) selected from the group consisting of DOM10-176-535 (SEQ ID NO:1587), DOM10-53-223 (SEQ ID NO:1090), DOM10-53-234 (SEQ ID NO:1101), DOM10-53-316 (SEQ ID NO:1182), DOM10-53-339 (SEQ ID NO:1203), DOM10-53-344 (SEQ ID NO:1208), DOM10-53-396 (SEQ ID NO:1260), DOM10-53-474 (SEQ ID NO: 2369) and DOM10-275-1 (SEQ ID NO:2241).

4. The ligand of claim 1, wherein said protein moiety that has a binding site with binding specificity for IL-4 competes for binding to IL-4 with IL-4Rα, an IL-4-binding portion of IL-4Rα or an anti-IL-4 domain antibody (dAb) selected from the group consisting of DOM9-44-502(SEQ ID NO:512), DOM9-155-5 (SEQ ID NO:605), DOM9-155-25 (SEQ ID NO:617), DOM9-112-155 (SEQ ID NO:292), DOM9-112-168 (SEQ ID NO:305), DOM9-112-174 (SEQ ID NO:311), DOM9-112-199 (SEQ ID NO:336), DOM9-112-200 (SEQ ID NO:337), DOM9-155-77 (SEQ ID NO:2426), DOM9-155-78 (SEQ ID NO:2427), DOM9-112-202 (SEQ ID NO:339), DOM9-112-209 (SEQ ID NO:2433), DOM9-112-210 (SEQ ID NO:2434) and DOM9-44-502 (SEQ ID NO:512); and said protein moiety that has a binding site with binding specificity for IL-13 competes for binding to IL-13 with IL-13Rα1, an IL-13-binding portion of IL-13Rα1, IL-13Rα2, and IL-13-binding portion of IL-13Rα2, or an anti-IL-13 domain antibody (dAb) selected from the group consisting of DOM10-176-535 (SEQ ID NO:1587), DOM10-53-223 (SEQ ID NO:1090), DOM10-53-234 (SEQ ID NO:1101), DOM10-53-316 (SEQ ID NO:1182), DOM10-53-339 (SEQ ID NO:1203), DOM10-53-344 (SEQ ID NO:1208), DOM10-53-396 (SEQ ID NO:1260), DOM10-53-474 (SEQ ID NO:2369) and DOM10-275-1 (SEQ ID NO:2241).

5. The ligand of claim 1, wherein said protein moiety that has a binding site with binding specificity for IL-4 is provided by an antibody fragment, and said protein moiety that has a binding site with binding specificity for IL-13 is provided by an antibody fragment.

6. The ligand of claim 5, wherein the antibody fragments are each an immunoglobulin single variable domain.

7. The ligand of claim 1, wherein said ligand inhibits binding of IL-4 to IL-4R.

8. The ligand of claim 1, wherein said ligand inhibits the activity of IL-4.

9. The ligand of claim 1, wherein said ligand inhibits the activity of IL-4 without substantially inhibiting binding of IL-4 to IL-4R.

10. The ligand of claim 1, wherein said ligand inhibits binding of IL-13 to IL-13Rα1 and/or IL-13Rα2.

11. The ligand of claim 1, wherein said ligand inhibits the activity of IL-13.

12. The ligand of claim 1, wherein said ligand inhibits the activity of IL-13 without substantially inhibiting binding of IL-13 to IL-13Rα1 and/or IL-13Rα2.

13. A ligand that has binding specificity for IL-4 and IL-13, comprising an immunoglobulin single variable domain with binding specificity for IL-4 and an immunoglobulin single variable domain with binding specificity for IL-13, wherein
said immunoglobulin single variable domain with binding specificity for IL-4 competes for binding to IL-4 with an anti-IL-4 domain antibody (dAb) selected from the group consisting of DOM9-44-502 (SEQ ID NO:512), DOM9-155-5 (SEQ ID NO:605), DOM9-155-25 (SEQ ID NO:617), DOM9-112-155 (SEQ ID NO:292), DOM9-112-168 (SEQ ID NO:305), DOM9-112-174 (SEQ ID NO:311), DOM9-112-199 (SEQ ID NO:336), DOM9-112-200 (SEQ ID NO:337), DOM9-155-77 (SEQ ID NO:2426), DOM9-155-78 (SEQ ID NO:2427), DOM9-112-202 (SEQ ID NO:339), DOM9-112-209 (SEQ ID NO:2433), DOM9-112-210 (SEQ ID NO:2434) and DOM9-44-502 (SEQ ID NO:512); and
said immunoglobulin single variable domain with binding specificity for IL-13 competes for binding to IL-13 with an anti-IL-13 domain antibody (dAb) selected from the group consisting of DOM10-176-535 (SEQ ID NO:1587), DOM10-53-223 (SEQ ID NO:1090), DOM10-53-234 (SEQ ID NO:1101), DOM10-53-316 (SEQ ID NO:1182), DOM10-53-339 (SEQ ID NO:1203), DOM10-53-344 (SEQ ID NO:1208), DOM10-53-396 (SEQ ID NO:1260), DOM10-53-474 (SEQ ID NO:2369) and DOM10-275-1 (SEQ ID NO:2241).

14. The ligand of claim 13, wherein said ligand inhibits binding of IL-4 to IL-4R.

15. The ligand of claim 13, wherein said ligand inhibits the activity of IL-4.

16. The ligand of claim 13, wherein said ligand inhibits the activity of IL-4 without substantially inhibiting binding of IL-4 to IL-4R.

17. The ligand of claim 13, wherein said ligand inhibits binding of IL-13 to IL-13Rα1 and/or IL-13Rα2.

18. The ligand of claim 13, wherein said ligand inhibits the activity of IL-13.

19. The ligand of claim 13, wherein said ligand inhibits the activity of IL-13 without substantially inhibiting binding of IL-13 to IL-13Rα1 and/or IL-13Rα2.

20. The ligand of claim 13 wherein each said immunoglobulin single variable domain with binding specificity for IL-4 binds IL-4 with an affinity (KD) that is between about 100 nM and about 1 pM, as determined by surface plasmon resonance.

21. The ligand of claim 13 wherein each said immunoglobulin single variable domain with binding specificity for IL-13 binds IL-13 with an affinity (KD) that is between about 100 nM and about 1 pM, as determined by surface plasmon resonance.

22. The ligand of claim 13 wherein said ligand binds IL-4 with an affinity (KD) that is between about 100 nM and about 1 pM, as determined by surface plasmon resonance.

23. The ligand of claim 13 wherein said ligand binds IL-13 with an affinity (KD) that is between about 100 nM and about 1 pM, as determined by surface plasmon resonance.

24. The ligand of claim 13, wherein said immunoglobulin single variable domain with binding specificity for IL-4 and said immunoglobulin single variable domain with binding specificity for IL-13 are independently selected from the group consisting of a human V_{H} and a human V_{L}.

25. The ligand of claim 13, wherein said ligand is an IgG-like format comprising two immunoglobulin single variable domains with binding specificity for IL-4, and two immunoglobulin single variable domains with binding specificity for IL-13.

26. The ligand of claim 1, wherein said ligand comprises an antibody Fc region.

27. The ligand of claim 1, wherein said ligand comprises an IgG constant region.

28. A ligand that has binding specificity for IL-4, comprising an immunoglobulin single variable domain with binding specificity for IL-4, wherein said immunoglobulin single variable domain with binding specificity for IL-4 competes for binding to IL-4 with an anti-IL-4 domain antibody (dAb) selected from the group consisting of DOM9-44-502 (SEQ ID NO:512), DOM9-155-5 (SEQ ID NO:605), DOM9-155-25 (SEQ ID NO:617), DOM9-112-155 (SEQ ID NO:292), DOM9-112-168 (SEQ ID NO:305), DOM9-112-174 (SEQ ID NO:311), DOM9-112-199 (SEQ ID NO:336), DOM9-112-200 (SEQ ID NO:337), DOM9-155-77 (SEQ ID NO:2426), DOM9-155-78 (SEQ ID NO:2427), DOM9-112-202 (SEQ ID NO:339), DOM9-112-209 (SEQ ID NO:2433), DOM9-112-210 (SEQ ID NO:2434) and DOM9-44-502 (SEQ ID NO:512).

29. The ligand of claim 28, wherein said immunoglobulin single variable domain with binding specificity for IL-4 comprises an amino acid sequence that has at least about 85% amino acid sequence identity with the amino acid sequence of a dAb selected from the group consisting of DOM9-44-502 (SEQ ID NO:512), DOM9-155-5 (SEQ ID NO:605), DOM9-155-25 (SEQ ID NO:617), DOM9-112-155 (SEQ ID NO:292), DOM9-112-168 (SEQ ID NO:305), DOM9-112-174 (SEQ ID NO:311), DOM9-112-199 (SEQ ID NO:336), DOM9-112-200 (SEQ ID NO:337), DOM9-155-77 (SEQ ID NO:2426), DOM9-155-78 (SEQ ID NO:2427), DOM9-112-202 (SEQ ID NO:339), DOM9-112-209 (SEQ ID NO:2433), DOM9-112-210 (SEQ ID NO:2434) and DOM9-44-502 (SEQ ID NO:512).

30. The ligand of claim 28, wherein said ligand inhibits binding of IL-4 to IL-4Rα.

31. The ligand of claim 28, wherein said ligand inhibits the activity of IL-4.

32. The ligand of claim 28, wherein said ligand inhibits the activity of IL-4 without substantially inhibiting binding of IL-4 to IL-4Rα.

33. The ligand of claim 28, wherein said immunoglobulin single variable domain with binding specificity for IL-4 binds IL-4 with an affinity (KD) that is between about 100 nM and about 1 pM, as determined by surface plasmon resonance.

34. The ligand of claim 28, wherein said ligand binds IL-4 with an affinity (KD) that is between 100 nM and about 1 pM, as determined by surface plasmon resonance.

35. The ligand of claim 28, wherein said immunoglobulin single variable domain with binding specificity for IL-4 is selected from the group consisting of a human V_{H} and a human V_{L}.

36. The ligand of claim 1, wherein said ligand is an IgG-like format.

37. The ligand of claim 28, wherein said ligand comprises an antibody Fc region.

38. The ligand of claim 28, wherein said ligand comprises an IgG constant region.

39. A ligand that has binding specificity for IL-13, comprising an immunoglobulin single variable domain with binding specificity for IL-13, wherein said immunoglobulin single variable domain with binding specificity for IL-13 competes for binding to IL-13 with an anti-IL-13 domain antibody (dAb) selected from the group consisting of DOM10-176-535 (SEQ ID NO:1587), DOM10-53-223 (SEQ ID NO:1090), DOM10-53-234 (SEQ ID NO:1101), DOM10-53-316 (SEQ ID NO:1182), DOM10-53-339 (SEQ ID NO:1203), DOM10-53-344 (SEQ ID NO:1208), DOM10-53-396 (SEQ ID NO:1260), DOM10-53-474 (SEQ ID NO:2369) and DOM10-275-1 (SEQ ID NO:2241).

40. The ligand of claim 28, wherein said immunoglobulin single variable domain with binding specificity for IL-13 comprises an amino acid sequence that has at least about 85% amino acid sequence identity with the amino acid sequence of a dAb selected from the group consisting of DOM10-176-535 (SEQ ID NO:1587), DOM10-53-223 (SEQ ID NO:1090), DOM10-53-234 (SEQ ID NO:1101), DOM10-53-316 (SEQ ID NO:1182), DOM10-53-339 (SEQ ID NO:1203), DOM10-53-344 (SEQ ID NO:1208), DOM10-53-396 (SEQ ID NO:1260), DOM10-53-474 (SEQ ID NO:2369) and DOM10-275-1 (SEQ ID NO:2241).

41. The ligand of claim 39, wherein said ligand inhibits binding of IL-13 to IL-13Rα1 and/or IL-13Rα2.

42. The ligand of claim 39, wherein said ligand inhibits the activity of IL-13.

43. The ligand of claim 39, wherein said ligand inhibits the activity of IL-13 without substantially inhibiting binding of IL-13 to IL-13Rα1 and/or IL-13Rα2.

44. The ligand of claim 39, wherein said immunoglobulin single variable domain with binding specificity for IL-13 binds IL-13 with an affinity (KD) that is between about 100 nM and about 1 pM, as determined by surface plasmon resonance.

45. The ligand of claim 39, wherein said ligand binds IL-13 with an affinity (KD) that is between 100 nM and about 1 pM, as determined by surface plasmon resonance.

46. The ligand of claim 39, wherein said immunoglobulin single variable domain with binding specificity for IL-13 is independently selected from the group consisting of a human V_{H} and a human V_{L}.

47. The ligand of claim 39, wherein said ligand is an IgG-like format.

48. The ligand of claim 39, wherein said ligand comprises an antibody Fc region.

49. The ligand of claim 39, wherein said ligand comprises an IgG constant region.

50. A ligand that has binding specificity for IL-4 and IL-13, wherein said ligand is a fusion protein comprising an immunoglobulin single variable domain with binding specificity for IL-4 and an immunoglobulin single variable domain with binding specificity for IL-13, wherein
said immunoglobulin single variable domain with binding specificity for IL-4 competes for binding to IL-4 with an anti-IL-4 domain antibody (dAb) selected from the group consisting of DOM9-44-502 (SEQ ID NO:512), DOM9-155-5 (SEQ ID NO:605), DOM9-155-25 (SEQ ID NO:617), DOM9-112-155 (SEQ ID NO:292), DOM9-112-168 (SEQ ID NO:305), DOM9-112-174 (SEQ ID NO:311), DOM9-112-199 (SEQ ID NO:336), DOM9-112-200 (SEQ ID NO:337), DOM9-155-77 (SEQ ID NO:2426), DOM9-155-78 (SEQ ID NO:2427), DOM9-112-202 (SEQ ID NO:339), DOM9-112-209 (SEQ ID NO:2433), DOM9-112-210 (SEQ ID NO:2434) and DOM9-44-502 (SEQ ID NO:512); and
said immunoglobulin single variable domain with binding specificity for IL-13 competes for binding to IL-13 with an anti-IL-13 domain antibody (dAb) selected from the group consisting of DOM10-176-535 (SEQ ID NO:1587), DOM10-53-223 (SEQ ID NO:1090), DOM10-53-234 (SEQ ID NO:1101), DOM10-53-316 (SEQ ID NO:1182), DOM10-53-339 (SEQ ID NO:1203), DOM10-53-344 (SEQ ID NO:1208), DOM10-53-396 (SEQ ID NO:1260), DOM10-53-474 (SEQ ID NO:2369) and DOM10-275-1 (SEQ ID NO:2241).

51. The ligand of claim 50, wherein said immunoglobulin single variable domain with binding specificity for IL-4 comprises an amino acid sequence that has at least about 85% amino acid sequence identity with the amino acid sequence of a dAb selected from the group consisting of DOM9-44-502 (SEQ ID NO:512), DOM9-155-5 (SEQ ID NO:605), DOM9-155-25 (SEQ ID NO:617), DOM9-112-155 (SEQ ID NO:292), DOM9-112-168 (SEQ ID NO:305), DOM9-112-174 (SEQ ID NO:311), DOM9-112-199 (SEQ ID NO:336), DOM9-112-200 (SEQ ID NO:337), DOM9-155-77 (SEQ ID NO:2426), DOM9-155-78 (SEQ ID NO:2427), DOM9-112-202 (SEQ ID NO:339), DOM9-112-209 (SEQ ID NO:2433), DOM9-112-210 (SEQ ID NO:2434) and DOM9-44-502 (SEQ ID NO:512).

52. The ligand of claim 50, wherein said immunoglobulin single variable domain with binding specificity for IL-13 comprises an amino acid sequence that has at least about 85% amino acid sequence identity with the amino acid sequence of a dAb selected from the group consisting of DOM10-176-535 (SEQ ID NO:1587), DOM10-53-223 (SEQ ID NO:1090), DOM10-53-234 (SEQ ID NO:1101), DOM10-53-316 (SEQ ID NO:1182), DOM10-53-339 (SEQ ID NO:1203), DOM10-53-344 (SEQ ID NO:1208), DOM10-53-396 (SEQ ID NO:1260), DOM10-53-474 (SEQ ID NO:2369) and DOM10-275-1 (SEQ ID NO:2241).

53. The ligand of claim 50, wherein said fusion protein further comprises a linker moiety.

54. A ligand that has binding specificity for IL-4 comprising a protein moiety that has a binding site with binding specificity for IL-4, wherein said protein moiety comprises an amino acid sequence that is the same as the amino acid sequence of CDR3 of a dAb selected from the group consisting of DOM9-44-502 (SEQ ID NO:512), DOM9-155-5 (SEQ ID NO:605), DOM9-155-25 (SEQ ID NO:617), DOM9-112-155 (SEQ ID NO:292), DOM9-112-168 (SEQ ID NO:305), DOM9-112-174 (SEQ ID NO:311), DOM9-112-199 (SEQ ID NO:336), DOM9-112-200 (SEQ ID NO:337), DOM9-155-77 (SEQ ID NO:2426), DOM9-155-78 (SEQ ID NO:2427), DOM9-112-202 (SEQ ID NO:339), DOM9-112-209 (SEQ ID NO:2433), DOM9-112-210 (SEQ ID NO:2434) and DOM9-44-502 (SEQ ID NO:512).

55. The ligand of claim 54, wherein said protein moiety further comprises an amino acid sequence that is the same as the amino acid sequence of CDR1 and/or CDR2 of a dAb selected from the group consisting of DOM9-44-502 (SEQ ID NO:512), DOM9-155-5 (SEQ ID NO:605), DOM9-155-25 (SEQ ID NO:617), DOM9-112-155 (SEQ ID NO:292), DOM9-112-168 (SEQ ID NO:305), DOM9-112-174 (SEQ ID NO:311), DOM9-112-199 (SEQ ID NO:336), DOM9-112-200 (SEQ ID NO:337), DOM9-155-77 (SEQ ID NO:2426), DOM9-155-78 (SEQ ID NO:2427), DOM9-112-202 (SEQ ID NO:339), DOM9-112-209 (SEQ ID NO:2433), DOM9-112-210 (SEQ ID NO:2434) and DOM9-44-502 (SEQ ID NO:512).

56. A ligand comprising an immunoglobulin single variable domain that binds IL-4, wherein the amino acid sequence of said immunoglobulin single variable domain that binds IL-4 differs from the amino acid sequence of DOM9-44-502 (SEQ ID NO:512), DOM9-155-5 (SEQ ID NO:605), DOM9-155-25 (SEQ ID NO:617), DOM9-112-155 (SEQ ID NO:292), DOM9-112-168 (SEQ ID NO:305), DOM9-112-174 (SEQ ID NO:311), DOM9-112-199 (SEQ ID NO:336), DOM9-112-200 (SEQ ID NO:337), DOM9-155-77 (SEQ ID NO:2426), DOM9-155-78 (SEQ ID NO:2427), DOM9-112-202 (SEQ ID NO:339), DOM9-112-209 (SEQ ID NO:2433), DOM9-112-210 (SEQ ID NO:2434) or DOM9-44-502 (SEQ ID NO:512) at no more than 25 amino acid positions and has a CDR1 sequence that has at least 50% identity to the CDR1 sequence of DOM9-44-502 (SEQ ID NO:512), DOM9-155-5 (SEQ ID NO:605), DOM9-155-25 (SEQ ID NO:617), DOM9-112-155 (SEQ ID NO:292), DOM9-112-168 (SEQ ID NO:305), DOM9-112-174 (SEQ ID NO:311), DOM9-112-199 (SEQ ID NO:336), DOM9-112-200 (SEQ ID NO:337), DOM9-155-77 (SEQ ID NO:2426), DOM9-155-78 (SEQ ID NO:2427), DOM9-112-202 (SEQ ID NO:339), DOM9-112-209 (SEQ ID NO:2433), DOM9-112-210 (SEQ ID NO:2434) and DOM9-44-502 (SEQ ID NO:512).

57. A ligand comprising an immunoglobulin single variable domain that binds IL-4, wherein the amino acid sequence of said immunoglobulin single variable domain that binds IL-4 differs from the amino acid sequence of DOM9-44-502 (SEQ ID NO:512), DOM9-155-5 (SEQ ID NO:605), DOM9-155-25 (SEQ ID NO:617), DOM9-112-155 (SEQ ID NO:292), DOM9-112-168 (SEQ ID NO:305), DOM9-112-174 (SEQ ID NO:311), DOM9-112-199 (SEQ ID NO:336), DOM9-112-200 (SEQ ID NO:337), DOM9-155-77 (SEQ ID NO:2426), DOM9-155-78 (SEQ ID NO:2427), DOM9-112-202 (SEQ ID NO:339), DOM9-112-209 (SEQ ID NO:2433), DOM9-112-210 (SEQ ID NO:2434) or DOM9-44-502 (SEQ ID NO:512) at no more than 25 amino acid positions and has a CDR2 sequence that has at least 50% identity to the CDR2 sequence of DOM9-44-502 (SEQ ID NO:512), DOM9-155-5 (SEQ ID NO:605), DOM9-155-25 (SEQ ID NO:617), DOM9-112-155 (SEQ ID NO:292), DOM9-112-168 (SEQ ID NO:305), DOM9-112-174 (SEQ ID NO:311), DOM9-112-199 (SEQ ID NO:336), DOM9-112-200 (SEQ ID NO:337), DOM9-155-77 (SEQ ID NO:2426), DOM9-155-78 (SEQ ID NO:2427), DOM9-112-202 (SEQ ID NO:339), DOM9-112-209 (SEQ ID NO:2433), DOM9-112-210 (SEQ ID NO:2434) and DOM9-44-502 (SEQ ID NO:512).

58. A ligand comprising an immunoglobulin single variable domain that binds IL-4, wherein the amino acid sequence of said immunoglobulin single variable domain that binds IL-4 differs from the amino acid sequence DOM9-44-502 (SEQ ID NO:512), DOM9-155-5 (SEQ ID NO:605), DOM9-155-25 (SEQ ID NO:617), DOM9-112-155 (SEQ ID NO:292), DOM9-112-168 (SEQ ID NO:305), DOM9-112-174 (SEQ ID NO:311), DOM9-112-199 (SEQ ID NO:336), DOM9-112-200 (SEQ ID NO:337), DOM9-155-77 (SEQ ID NO:2426), DOM9-155-78 (SEQ ID NO:2427), DOM9-112-202 (SEQ ID NO:339), DOM9-112-209 (SEQ ID NO:2433), DOM9-112-210 (SEQ ID NO:2434) and DOM9-44-502 (SEQ ID NO:512) at no more than 25 amino acid positions and has a CDR3 sequence that has at least 50% identity to the CDR3 sequence of DOM9-44-502 (SEQ ID NO:512), DOM9-155-5 (SEQ ID NO:605), DOM9-155-25 (SEQ ID NO:617), DOM9-112-155 (SEQ ID NO:292), DOM9-112-168 (SEQ ID NO:305), DOM9-112-174 (SEQ ID NO:311), DOM9-112-199 (SEQ ID NO:336), DOM9-112-200 (SEQ ID NO:337), DOM9-155-77 (SEQ ID NO:2426), DOM9-155-78 (SEQ ID NO:2427), DOM9-112-202 (SEQ ID NO:339), DOM9-112-209 (SEQ ID NO:2433), DOM9-112-210 (SEQ ID NO:2434) and DOM9-44-502 (SEQ ID NO:512).

59. A ligand comprising an immunoglobulin single variable domain that binds IL-4, wherein the amino acid sequence of said immunoglobulin single variable domain that binds IL-4 differs from the amino acid sequence of DOM9-44-502 (SEQ ID NO:512), DOM9-155-5 (SEQ ID NO:605), DOM9-155-25 (SEQ ID NO:617), DOM9-112-155 (SEQ ID NO:292), DOM9-112-168 (SEQ ID NO:305), DOM9-112-174 (SEQ ID NO:311), DOM9-112-199 (SEQ ID NO:336), DOM9-112-200 (SEQ ID NO:337), DOM9-155-77 (SEQ ID NO:2426), DOM9-155-78 (SEQ ID NO:2427), DOM9-112-202 (SEQ ID NO:339), DOM9-112-209 (SEQ ID NO:2433), DOM9-112-210 (SEQ ID NO:2434) and DOM9-44-502 (SEQ ID NO:512) at no more than 25 amino acid positions and has a CDR1 sequence and a CDR2 sequence that have at least 50% identity to the CDR1 or CDR2 sequences, respectively, of DOM9-44-502 (SEQ ID NO:512), DOM9-155-5 (SEQ ID NO:605), DOM9-155-25 (SEQ ID NO:617), DOM9-112-155 (SEQ ID NO:292), DOM9-112-168 (SEQ ID NO:305), DOM9-112-174 (SEQ ID NO:311), DOM9-112-199 (SEQ ID NO:336), DOM9-112-200 (SEQ ID NO:337), DOM9-155-77 (SEQ ID NO:2426), DOM9-155-78 (SEQ ID NO:2427), DOM9-112-202 (SEQ ID NO:339), DOM9-112-209 (SEQ ID NO:2433), DOM9-112-210 (SEQ ID NO:2434) and DOM9-44-502 (SEQ ID NO:512).

60. A ligand comprising an immunoglobulin single variable domain that binds IL-4, wherein the amino acid sequence of said immunoglobulin single variable domain that binds IL-4 differs from the amino acid sequence of DOM9-44-502 (SEQ ID NO:512), DOM9-155-5 (SEQ ID NO:605), DOM9-155-25 (SEQ ID NO:617), DOM9-112-155 (SEQ ID NO:605), DOM9-112-168 (SEQ ID NO:305), DOM9-112-174 (SEQ ID NO:311), DOM9-112-199 (SEQ ID NO:336), DOM9-112-200 (SEQ ID NO:337), DOM9-155-77 (SEQ ID NO:2426), DOM9-155-78 (SEQ ID NO:2427), DOM9-112-202 (SEQ ID NO:339), DOM9-112-209 (SEQ ID NO:2433), DOM9-112-210 (SEQ ID NO:2434) and DOM9-44-502 (SEQ ID NO:512) at no more than 25 amino acid positions and has a CDR2 sequence and a CDR3 sequence that have at least 50% identity to the CDR2 or CDR3 sequences, respectively, of DOM9-44-502 (SEQ ID NO:512), DOM9-155-5 (SEQ ID NO:605), DOM9-155-25 (SEQ ID NO:617), DOM9-112-155 (SEQ ID NO:605), DOM9-112-168 (SEQ ID NO:305), DOM9-112-174 (SEQ ID NO:311), DOM9-112-199 (SEQ ID NO:336), DOM9-112-200 (SEQ ID NO:337), DOM9-155-77 (SEQ ID NO:2426), DOM9-155-78 (SEQ ID NO:2427), DOM9-112-202 (SEQ ID NO:339), DOM9-112-209 (SEQ ID NO:2433), DOM9-112-210 (SEQ ID NO:2434) and DOM9-44-502 (SEQ ID NO:512).

61. A ligand comprising an immunoglobulin single variable domain that binds IL-4, wherein the amino acid sequence of said immunoglobulin single variable domain that binds IL-4 differs from the amino acid sequence of DOM9-44-502 (SEQ ID NO:512), DOM9-155-5 (SEQ ID NO:605), DOM9-155-25 (SEQ ID NO:617), DOM9-112-155 (SEQ ID NO:605), DOM9-112-168 (SEQ ID NO:305), DOM9-112-174 (SEQ ID NO:311), DOM9-112-199 (SEQ ID NO:336), DOM9-112-200 (SEQ ID NO:337), DOM9-155-77 (SEQ ID NO:2426), DOM9-155-78 (SEQ ID NO:2427), DOM9-112-202 (SEQ ID NO:339), DOM9-112-209 (SEQ ID NO:2433), DOM9-112-210 (SEQ ID NO:2434) and DOM9-44-502 (SEQ ID NO:512) at no more than 25 amino acid positions and has a CDR1 sequence and a CDR3 sequence that have at least 50% identity to the CDR1 or CDR3 sequences, respectively, of DOM9-44-502 (SEQ ID NO:512), DOM9-155-5 (SEQ ID NO:605), DOM9-155-25 (SEQ ID NO:617), DOM9-112-155 (SEQ ID NO:292), DOM9-112-168 (SEQ ID NO:305), DOM9-112-174 (SEQ ID NO:311), DOM9-112-199 (SEQ ID NO:336), DOM9-112-200 (SEQ ID NO:337), DOM9-155-77 (SEQ ID NO:2426), DOM9-155-78 (SEQ ID NO:2427), DOM9-112-202 (SEQ ID NO:339), DOM9-112-209 (SEQ ID NO:2433), DOM9-112-210 (SEQ ID NO:2434) and DOM9-44-502 (SEQ ID NO:512).

62. A ligand comprising an immunoglobulin single variable domain that binds IL-4, wherein the amino acid sequence of said immunoglobulin single variable domain that binds IL-4 differs from the amino acid sequence of DOM9-44-502 (SEQ ID NO:512), DOM9-155-5 (SEQ ID NO:605), DOM9-155-25 (SEQ ID NO:617), DOM9-112-155 (SEQ ID NO:292), DOM9-112-168 (SEQ ID NO:305), DOM9-112-174 (SEQ ID NO:311), DOM9-112-199 (SEQ ID NO:336), DOM9-112-200 (SEQ ID NO:337), DOM9-155-77 (SEQ ID NO:2426), DOM9-155-78 (SEQ ID NO:2427), DOM9-112-202 (SEQ ID NO:339), DOM9-112-209 (SEQ ID NO:2433), DOM9-112-210 (SEQ ID NO:2434) and DOM9-44-502 (SEQ ID NO:512) at no more than 25 amino acid positions and has a CDR1 sequence, a CDR2 sequence and a CDR3 sequence that have at least 50% identity to the CDR1, CDR2 or CDR3 sequences, respectively, of DOM9-44-502 (SEQ ID NO:512), DOM9-155-5 (SEQ ID NO:605), DOM9-155-25 (SEQ ID NO:617), DOM9-112-155 (SEQ ID NO:292), DOM9-112-168 (SEQ ID NO:305), DOM9-112-174 (SEQ ID NO:311), DOM9-112-199 (SEQ ID NO:336), DOM9-112-200 (SEQ ID NO:337), DOM9-155-77 (SEQ ID NO:2426), DOM9-155-78 (SEQ ID NO:2427), DOM9-112-202 (SEQ ID NO:339), DOM9-112-209 (SEQ ID NO:2433), DOM9-112-210 (SEQ ID NO:2434) and DOM9-44-502 (SEQ ID NO:512).

63. A ligand comprising an immunoglobulin single variable domain that binds IL-4, wherein said immunoglobulin single variable domain that binds IL-4 comprises a CDR2 sequence that has at least 50% identity to the CDR2 sequence of DOM9-44-502 (SEQ ID NO:512), DOM9-155-5 (SEQ ID NO:605), DOM9-155-25 (SEQ ID NO:617), DOM9-112-155 (SEQ ID NO:292), DOM9-112-168 (SEQ ID NO:305), DOM9-112-174 (SEQ ID NO:311), DOM9-112-199 (SEQ ID NO:336), DOM9-112-200 (SEQ ID NO:337), DOM9-155-77 (SEQ ID NO:2426), DOM9-155-78 (SEQ ID NO:2427), DOM9-112-202 (SEQ ID NO:339), DOM9-112-209 (SEQ ID NO:2433), DOM9-112-210 (SEQ ID NO:2434) and DOM9-44-502 (SEQ ID NO:512).

64. A ligand comprising an immunoglobulin single variable domain that binds IL-4, wherein said immunoglobulin single variable domain that binds IL-4 comprises a CDR3 sequence that has at least 50% identity to the CDR3 sequence of DOM9-44-502 (SEQ ID NO:512), DOM9-155-5 (SEQ ID NO:605), DOM9-155-25 (SEQ ID NO:617), DOM9-112-155 (SEQ ID NO:292), DOM9-112-168 (SEQ ID NO:305), DOM9-112-174 (SEQ ID NO:311), DOM9-112-199 (SEQ ID NO:336), DOM9-112-200 (SEQ ID NO:337), DOM9-155-77 (SEQ ID NO:2426), DOM9-155-78 (SEQ ID NO:2427), DOM9-112-202 (SEQ ID NO:339), DOM9-112-209 (SEQ ID NO:2433), DOM9-112-210 (SEQ ID NO:2434) and DOM9-44-502 (SEQ ID NO:512).

65. A ligand comprising an immunoglobulin single variable domain that binds IL-4, wherein said immunoglobulin single variable domain that binds IL-4 comprises a CDR1 and a CDR2 sequence that has at least 50% identity to the CDR1 and CDR2 sequences, respectively, of DOM9-44-502 (SEQ ID NO:512), DOM9-155-5 (SEQ ID NO:605), DOM9-155-25 (SEQ ID NO:617), DOM9-112-155 (SEQ ID NO:292), DOM9-112-168 (SEQ ID NO:305), DOM9-112-174 (SEQ ID NO:311), DOM9-112-199 (SEQ ID NO:336), DOM9-112-200 (SEQ ID NO:337), DOM9-155-77 (SEQ ID NO:2426), DOM9-155-78 (SEQ ID NO:2427), DOM9-112-202 (SEQ ID NO:339), DOM9-112-209 (SEQ ID NO:2433), DOM9-112-210 (SEQ ID NO:2434) and DOM9-44-502 (SEQ ID NO:512).

66. A ligand comprising an immunoglobulin single variable domain that binds IL-4, wherein said immunoglobulin single variable domain that binds IL-4 comprises a CDR2 and a CDR3 sequence that has at least 50% identity to the CDR2 and CDR3 sequences, respectively, of DOM9-44-502 (SEQ ID NO:512), DOM9-155-5 (SEQ ID NO:605), DOM9-155-25 (SEQ ID NO:617), DOM9-112-155 (SEQ ID NO:292), DOM9-112-168 (SEQ ID NO:305), DOM9-112-174 (SEQ ID NO:311), DOM9-112-199 (SEQ ID NO:336), DOM9-112-200 (SEQ ID NO:337), DOM9-155-77 (SEQ ID NO:2426), DOM9-155-78 (SEQ ID NO:2427), DOM9-112-202 (SEQ ID NO:339), DOM9-112-209 (SEQ ID NO:2433), DOM9-112-210 (SEQ ID NO:2434) and DOM9-44-502 (SEQ ID NO:512).

67. A ligand comprising an immunoglobulin single variable domain that binds IL-4, wherein said immunoglobulin single variable domain that binds IL-4 comprises a CDR1 and a CDR3 sequence that has at least 50% identity to the CDR1 and CDR3 sequences, respectively, of DOM9-44-502 (SEQ ID NO:512), DOM9-155-5 (SEQ ID NO:605), DOM9-155-25 (SEQ ID NO:617), DOM9-112-155 (SEQ ID NO:292), DOM9-112-168 (SEQ ID NO:305), DOM9-112-174 (SEQ ID NO:311), DOM9-112-199 (SEQ ID NO:336), DOM9-112-200 (SEQ ID NO:337), DOM9-155-77 (SEQ ID NO:2426), DOM9-155-78 (SEQ ID NO:2427), DOM9-112-202 (SEQ ID NO:339), DOM9-112-209 (SEQ ID NO:2433), DOM9-112-210 (SEQ ID NO:2434) and DOM9-44-502 (SEQ ID NO:512).

68. A ligand comprising an immunoglobulin single variable domain that binds IL-4, wherein said immunoglobulin single variable domain that binds IL-4 comprises a CDR1, a CDR2 and a CDR3 sequence that has at least 50% identity to the CDR1, CDR2 and CDR3 sequences, respectively, of DOM9-44-502 (SEQ ID NO:512), DOM9-155-5 (SEQ ID NO:605), DOM9-155-25 (SEQ ID NO:617), DOM9-112-155 (SEQ ID NO:292), DOM9-112-168 (SEQ ID NO:305), DOM9-112-174 (SEQ ID NO:311), DOM9-112-199 (SEQ ID NO:336), DOM9-112-200 (SEQ ID NO:337), DOM9-155-77 (SEQ ID NO:2426), DOM9-155-78 (SEQ ID NO:2427), DOM9-112-202 (SEQ ID NO:339), DOM9-112-209 (SEQ ID NO:2433), DOM9-112-210 (SEQ ID NO:2434) and DOM9-44-502 (SEQ ID NO:512).

69. A ligand that has binding specificity for IL-13 comprising a protein moiety that has a binding site with binding specificity for IL-13, wherein said protein moiety comprises an amino acid sequence that is the same as the amino acid sequence of CDR3 of a dAb selected from the group consisting of DOM10-176-535 (SEQ ID NO:1587), DOM10-53-223 (SEQ ID NO:1090), DOM10-53-234 (SEQ ID NO:1101), DOM10-53-316 (SEQ ID NO:1182), DOM10-53-339 (SEQ ID NO:1203), DOM10-53-344 (SEQ ID NO:1208), DOM10-53-396 (SEQ ID NO:1260), DOM10-53-474 (SEQ ID NO:2369) and DOM10-275-1 (SEQ ID NO:2241).

70. The ligand of claim 69, wherein said protein moiety further comprises an amino acid sequence that is the same as the amino acid sequence of CDR1 and/or CDR2 of a dAb selected from the group consisting of DOM10-176-535 (SEQ ID NO:1587), DOM10-53-223 (SEQ ID NO:1090), DOM10-53-234 (SEQ ID NO:1101), DOM10-53-316 (SEQ ID NO:1182), DOM10-53-339 (SEQ ID NO:1203), DOM10-53-344 (SEQ ID NO:1208), DOM10-53-396 (SEQ ID NO:1260), DOM10-53-474 (SEQ ID NO:2369) and DOM10-275-1 (SEQ ID NO:2241).

71. A ligand comprising an immunoglobulin single variable domain that binds IL-13, wherein the amino acid sequence of said immunoglobulin single variable domain that binds IL-13 differs from the amino acid sequence of DOM10-176-535 (SEQ ID NO:1587), DOM10-53-223 (SEQ ID NO:1090), DOM10-53-234 (SEQ ID NO:1101), DOM10-53-316 (SEQ ID NO:1182), DOM10-53-339 (SEQ ID NO:1203), DOM10-53-344 (SEQ ID NO:1208), DOM10-53-396 (SEQ ID NO:1260), DOM10-53-474 (SEQ ID NO:2369) and DOM10-275-1 (SEQ ID NO:2241) at no more than 25 amino acid positions and has a CDR1 sequence that has at least 50% identity to the CDR1 sequence of a dAb selected from the group consisting of DOM10-176-535 (SEQ ID NO:1587), DOM10-53-223 (SEQ ID NO:1090), DOM10-53-234 (SEQ ID NO:1101), DOM10-53-316 (SEQ ID NO:1182), DOM10-53-339 (SEQ ID NO:1203), DOM10-53-344 (SEQ ID NO:1208), DOM10-53-396 (SEQ ID NO:1260), DOM10-53-474 (SEQ ID NO:2369) and DOM10-275-1 (SEQ ID NO:2241).

72. A ligand comprising an immunoglobulin single variable domain that binds IL-13, wherein the amino acid sequence of said immunoglobulin single variable domain that binds IL-13 differs from the amino acid sequence of DOM10-176-535 (SEQ ID NO:1587), DOM10-53-223 (SEQ ID NO:1090), DOM10-53-234 (SEQ ID NO:1101), DOM10-53-316 (SEQ ID NO:1182), DOM10-53-339 (SEQ ID NO:1203), DOM10-53-344 (SEQ ID NO:1208), DOM10-53-396 (SEQ ID NO:1260), DOM10-53-474 (SEQ ID NO:2369) and DOM10-275-1 (SEQ ID NO:2241) at no more than 25 amino acid positions and has a CDR2 sequence that has at least 50% identity to the CDR2 sequence of DOM10-176-535 (SEQ ID NO:1587), DOM10-53-223 (SEQ ID NO:1090), DOM10-53-234 (SEQ ID NO:1101), DOM10-53-316 (SEQ ID NO:1182), DOM10-53-339 (SEQ ID NO:1203), DOM10-53-344 (SEQ ID NO:1208), DOM10-53-396 (SEQ ID NO:1260), DOM10-53-474 (SEQ ID NO:2369) and DOM10-275-1 (SEQ ID NO:2241).

73. A ligand comprising an immunoglobulin single variable domain that binds IL-13, wherein the amino acid sequence of said immunoglobulin single variable domain that binds IL-13 differs from the amino acid sequence DOM10-176-535 (SEQ ID NO:1587), DOM10-53-223 (SEQ ID NO:1090), DOM10-53-234 (SEQ ID NO:1101), DOM10-53-316 (SEQ ID NO:1182), DOM10-53-339 (SEQ ID NO:1203), DOM10-53-344 (SEQ ID NO:1208), DOM10-53-396 (SEQ ID NO:1260), DOM10-53-474 (SEQ ID NO:2369) and DOM10-275-1 (SEQ ID NO:2241) at no more than 25 amino acid positions and has a CDR3 sequence that has at least 50% identity to the CDR3 sequence of a dAb selected from the group consisting of DOM10-176-535 (SEQ ID NO:1587), DOM10-53-223 (SEQ ID NO:1090), DOM10-53-234 (SEQ ID NO:1101), DOM10-53-316 (SEQ ID NO:1182), DOM10-53-339 (SEQ ID NO:1203), DOM10-53-344 (SEQ ID NO:1208), DOM10-53-396 (SEQ ID NO:1260), DOM10-53-474 (SEQ ID NO:2369) and DOM10-275-1 (SEQ ID NO:2241).

74. A ligand comprising an immunoglobulin single variable domain that binds IL-13, wherein the amino acid sequence of said immunoglobulin single variable domain that binds IL-13 differs from the amino acid sequence of DOM10-176-535 (SEQ ID NO:1587), DOM10-53-223 (SEQ ID NO:1090), DOM10-53-234 (SEQ ID NO:1101), DOM10-53-316 (SEQ ID NO:1182), DOM10-53-339 (SEQ ID NO:1203), DOM10-53-344 (SEQ ID NO:1208), DOM10-53-396 (SEQ ID NO:1260), DOM10-53-474 (SEQ ID NO:2369) and DOM10-275-1 (SEQ ID NO:2241) at no more than 25 amino acid positions and has a CDR1 sequence and a CDR2 sequence that have at least 50% identity to the CDR1 or CDR2 sequences, respectively, of a dAb selected from the group consisting of DOM10-176-535 (SEQ ID NO:1587), DOM10-53-223 (SEQ ID NO:1090), DOM10-53-234 (SEQ ID NO:1101), DOM10-53-316 (SEQ ID NO:1182), DOM10-53-339 (SEQ ID NO:1203), DOM10-53-344 (SEQ ID NO:1208), DOM10-53-396 (SEQ ID NO:1260), DOM10-53-474 (SEQ ID NO:2369) and DOM10-275-1 (SEQ ID NO:2241).

75. A ligand comprising an immunoglobulin single variable domain that binds IL-13, wherein the amino acid sequence of said immunoglobulin single variable domain that binds IL-13 differs from the amino acid sequence of DOM10-176-535 (SEQ ID NO:1587), DOM10-53-223 (SEQ ID NO:1090), DOM10-53-234 (SEQ ID NO:1101), DOM10-53-316 (SEQ ID NO:1182), DOM10-53-339 (SEQ ID NO:1203), DOM10-53-344 (SEQ ID NO:1208), DOM10-53-396 (SEQ ID NO:1260), DOM10-53-474 (SEQ ID NO:2369) and DOM10-275-1 (SEQ ID NO:2241) at no more than 25 amino acid positions and has a CDR2 sequence and a CDR3 sequence that have at least 50% identity to the CDR2 or CDR3 sequences, respectively, of a dAb selected from the group consisting of DOM10-176-535 (SEQ ID NO:1587), DOM10-53-223 (SEQ ID NO:1090), DOM10-53-234 (SEQ ID NO:1101), DOM10-53-316 (SEQ ID NO:1182), DOM10-53-339 (SEQ ID NO:1203), DOM10-53-344 (SEQ ID NO:1208), DOM10-53-396 (SEQ ID NO:1260), DOM10-53-474 (SEQ ID NO:2369) and DOM10-275-1 (SEQ ID NO:2241).

76. A ligand comprising an immunoglobulin single variable domain that binds IL-13, wherein the amino acid sequence of said immunoglobulin single variable domain that binds IL-13 differs from the amino acid sequence of DOM10-176-535 (SEQ ID NO:1587), DOM10-53-223 (SEQ ID NO:1090), DOM10-53-234 (SEQ ID NO:1101), DOM10-53-316 (SEQ ID NO:1182), DOM10-53-339 (SEQ ID NO:1203), DOM10-53-344 (SEQ ID NO:1208), DOM10-53-396 (SEQ ID NO:1260), DOM10-53-474 (SEQ ID NO:2369) and DOM10-275-1 (SEQ ID NO:2241) at no more than 25 amino acid positions and has a CDR1 sequence and a CDR3 sequence that have at least 50% identity to the CDR1 or CDR3 sequences, respectively, of a dAb selected from the group consisting of DOM10-176-535 (SEQ ID NO:1587), DOM10-53-223 (SEQ ID NO:1090), DOM10-53-234 (SEQ ID NO:1101), DOM10-53-316 (SEQ ID NO:1182), DOM10-53-339 (SEQ ID NO:1203), DOM10-53-344 (SEQ ID NO:1208), DOM10-53-396 (SEQ ID NO:1260), DOM10-53-474 (SEQ ID NO:2369) and DOM10-275-1 (SEQ ID NO:2241).

77. A ligand comprising an immunoglobulin single variable domain that binds IL-13, wherein the amino acid sequence of said immunoglobulin single variable domain that binds IL-13 differs from the amino acid sequence of DOM10-176-535 (SEQ ID NO:1587), DOM10-53-223 (SEQ ID NO:1090), DOM10-53-234 (SEQ ID NO:1101), DOM10-53-316 (SEQ ID NO:1182), DOM10-53-339 (SEQ ID NO:1203), DOM10-53-344 (SEQ ID NO:1208), DOM10-53-396 (SEQ ID NO:1260), DOM10-53-474 (SEQ ID NO:2369) and DOM10-275-1 (SEQ ID NO:2241) at no more than 25 amino acid positions and has a CDR1 sequence, a CDR2 sequence and a CDR3 sequence that have at least 50% identity to the CDR1, CDR2 or CDR3 sequences, respectively, a dAb selected from the group consisting of DOM10-176-535 (SEQ ID NO:1587), DOM10-53-223 (SEQ ID NO:1090), DOM10-53-234 (SEQ ID NO:1101), DOM10-53-316 (SEQ ID NO:1182), DOM10-53-339 (SEQ ID NO:1203), DOM10-53-344 (SEQ ID NO:1208), DOM10-53-396 (SEQ ID NO:1260), DOM10-53-474 (SEQ ID NO:2369) and DOM10-275-1 (SEQ ID NO:2241).

78. A ligand comprising an immunoglobulin single variable domain that binds IL-13, wherein said immunoglobulin single variable domain that binds IL-13 comprises a CDR2 sequence that has at least 50% identity to the CDR2 sequence of a dAb selected from the group consisting of DOM10-176-535 (SEQ ID NO:1587), DOM10-53-223 (SEQ ID NO:1090), DOM10-53-234 (SEQ ID NO:1101), DOM10-53-316 (SEQ ID NO:1182), DOM10-53-339 (SEQ ID NO:1203), DOM10-53-344 (SEQ ID NO:1208), DOM10-53-396 (SEQ ID NO:1260), DOM10-53-474 (SEQ ID NO:2369) and DOM10-275-1 (SEQ ID NO:2241).

79. A ligand comprising an immunoglobulin single variable domain that binds IL-13, wherein said immunoglobulin single variable domain that binds IL-13 comprises a CDR3 sequence that has at least 50% identity to the CDR3 sequence of a dAb selected from the group consisting of DOM10-176-535 (SEQ ID NO:1587), DOM10-53-223 (SEQ ID NO:1090), DOM10-53-234 (SEQ ID NO:1101), DOM10-53-316 (SEQ ID NO:1182), DOM10-53-339 (SEQ ID NO:1203), DOM10-53-344 (SEQ ID NO:1208), DOM10-53-396 (SEQ ID NO:1260), DOM10-53-474 (SEQ ID NO:2369) and DOM10-275-1 (SEQ ID NO:2241).

80. A ligand comprising an immunoglobulin single variable domain that binds IL-13, wherein said immunoglobulin single variable domain that binds IL-4 comprises a CDR1 and a CDR2 sequence that has at least 50% identity to the CDR1 and CDR2 sequences, respectively, of a dAb selected from the group consisting of DOM10-176-535 (SEQ ID NO:1587), DOM10-53-223 (SEQ ID NO:1090), DOM10-53-234 (SEQ ID NO:1101), DOM10-53-316 (SEQ ID NO:1182), DOM10-53-339 (SEQ ID NO:1203), DOM10-53-344 (SEQ ID NO:1208), DOM10-53-396 (SEQ ID NO:1260), DOM10-53-474 (SEQ ID NO:2369) and DOM10-275-1 (SEQ ID NO:2241).

81. A ligand comprising an immunoglobulin single variable domain that binds IL-13, wherein said immunoglobulin single variable domain that binds IL-13 comprises a CDR2 and a CDR3 sequence that has at least 50% identity to the CDR2 and CDR3 sequences, respectively, of a dAb selected from the group consisting of DOM10-176-535 (SEQ ID NO:1587), DOM10-53-223 (SEQ ID NO:1090), DOM10-53-234 (SEQ ID NO:1101), DOM10-53-316 (SEQ ID NO:1182), DOM10-53-339 (SEQ ID NO:1203), DOM10-53-344 (SEQ ID NO:1208), DOM10-53-396 (SEQ ID NO:1260), DOM10-53-474 (SEQ ID NO:2369) and DOM10-275-1 (SEQ ID NO:2241).

82. A ligand comprising an immunoglobulin single variable domain that binds IL-13, wherein said immunoglobulin single variable domain that binds IL-13 comprises a CDR1 and a CDR3 sequence that has at least 50% identity to the CDR1 and CDR3 sequences, respectively, of a dAb selected from the group consisting of DOM10-176-535 (SEQ ID NO:1587), DOM10-53-223 (SEQ ID NO:1090), DOM10-53-234 (SEQ ID NO:1101), DOM10-53-316 (SEQ ID NO:1182), DOM10-53-339 (SEQ ID NO:1203), DOM10-53-344 (SEQ ID NO:1208), DOM10-53-396 (SEQ ID NO:1260), DOM10-53-474 (SEQ ID NO:2369) and DOM10-275-1 (SEQ ID NO:2241).

83. A ligand comprising an immunoglobulin single variable domain that binds IL-13, wherein said immunoglobulin single variable domain that binds IL-13 comprises a CDR1, a CDR2 and a CDR3 sequence that has at least 50% identity to the CDR1, CDR2 and CDR3 sequences, respectively, of a dAb selected from the group consisting of DOM10-176-535 (SEQ ID NO:1587), DOM10-53-223 (SEQ ID NO:1090), DOM10-53-234 (SEQ ID NO:1101), DOM10-53-316 (SEQ ID NO:1182), DOM10-53-339 (SEQ ID NO:1203), DOM10-53-344 (SEQ ID NO:1208), DOM10-53-396 (SEQ ID NO:1260), DOM10-53-474 (SEQ ID NO:2369) and DOM10-275-1 (SEQ ID NO:2241).

84. The ligand of claim 1, wherein said ligand further comprises a half-life extending moiety.

85. The ligand of claim 84, wherein said half-life extending moiety is a polyalkylene glycol moiety, serum albumin or a fragment thereof, transferring receptor or a transferring-binding portion thereof, or a moiety comprising a binding site for a polypeptide that enhances half-life in vivo.

86. The ligand of claim 85, wherein said half-life extending moiety is a moiety comprising a binding site for a polypeptide that enhances half-life in vivo selected from the group consisting of an affibody, a SpA domain, an LDL receptor class A domain, an EGF domain, and an avimer.

87. The ligand of claim 85, wherein said half-life extending moiety is a polyethylene glycol moiety.

88. The ligand of claim 85, wherein said half-life extending moiety is an antibody or antibody fragment comprising a binding site for serum albumin or neonatal Fc receptor.

89. The ligand of claim 85, wherein said antibody or antibody fragment comprising a binding site for serum albumin or neonatal Fc receptor is an antibody fragment, and said antibody fragment is an immunoglobulin single variable domain comprising a binding site for serum albumin.

90-98. (canceled)

99. A method for treating an allergic disease comprising administering to a subject in need thereof a therapeutically effective amount of ligand of claim 1.

100. A method for inhibiting a Th2-type immune response comprising administering to a subject in need thereof a therapeutically effective amount of ligand of claim 1.

101. A method for treating asthma comprising administering to a subject in need thereof a therapeutically effective amount of ligand of claim 1.

102. A method for treating cancer comprising administering to a subject in need thereof a therapeutically effective amount of ligand of claim 1.

103. (canceled)

104. A method of administering to a subject anti-IL-4 treatment and anti-IL-13 treatment, the method comprising simultaneous administration of an anti-IL-4 treatment and an anti-IL-13 treatment by administering to said subject a therapeutically effective amount of a ligand of claim 1.

105. A pharmaceutical composition comprising a ligand of claim 1 and a physiologically acceptable carrier.

106. The pharmaceutical composition of claim 105, wherein said composition comprises a vehicle for intravenous, intramuscular, intraperitoneal, intraarterial, intrathecal, intraarticular, or subcutaneous administration.

107. The pharmaceutical composition of claim 105, wherein said composition comprises a vehicle for pulmonary, intranasal, vaginal, or rectal administration.

108. A drug delivery device comprising the pharmaceutical composition of claim 105.

109. The drug delivery device of claim 108, wherein said device comprises a plurality of therapeutically effective doses of ligand.

110. The drug delivery device of claim 108, wherein said drug delivery device is selected from the group consisting of a parenteral delivery device, intravenous delivery device, intramuscular delivery device, intraperitoneal delivery device, transdermal delivery device, pulmonary delivery device, intraarterial delivery device, intrathecal delivery device, intraarticular delivery device, subcutaneous delivery device, intranasal delivery device, vaginal delivery device, and rectal delivery device.

111. The drug delivery device of claim 110, wherein said device is selected from the group consisting of a syringe, a transdermal delivery device, a capsule, a tablet, a nebulizer, an inhaler, an atomizer, an aerosolizer, a mister, a dry powder inhaler, a metered dose inhaler, a metered dose sprayer, a metered dose mister, a metered dose atomizer, and a catheter.

112. An isolated or recombinant nucleic acid encoding a ligand of claim 1.

113. A vector comprising the recombinant nucleic acid of claim 112.

114. A host cell comprising the recombinant nucleic acid of claim 112.

115. A method for producing a ligand comprising maintaining a host cell of claim 114 under conditions suitable for expression of said nucleic acid or vector, whereby a ligand is produced.

116. The method of claim 115, further comprising isolating the ligand.

117. A method of inhibiting proliferation of peripheral blood mononuclear cells (PBMC) in an allergen-sensitized subject, comprising administering to the subject a pharmaceutical composition comprising a ligand of claim 1.

118. The method of claim 117, wherein said allergen is selected from house dust mite, cat allergen, grass allergen, mold allergen, and pollen allergen.

119. A method of inhibiting proliferation of B cells in a subject, comprising administering to the subject a pharmaceutical composition comprising a ligand of claim 1.

120-124. (canceled)

125. A ligand that has binding specificity for IL-4 and IL-13, wherein said ligand is a fusion protein comprising an immunoglobulin single variable domain with binding specificity for IL-4 and an immunoglobulin single variable domain with binding specificity for IL-13, wherein
said immunoglobulin single variable domain with binding specificity for IL-4 competes for binding to IL-4 with an anti-IL-4 domain antibody (dAb) selected from the group consisting of DOM9-112-210 and DOM9-155-78; and
said immunoglobulin single variable domain with binding specificity for IL-13 competes for binding to IL-13 with an anti-IL-13 domain antibody (dAb) selected from the group consisting of DOM10-208, DOM10-212, DOM10-213, DOM10-215, DOM10-224, DOM10-270, DOM10-416, DOM10-236, DOM10-273, DOM10-275, DOM10-276 and DOM10-277.

126. A ligand that has binding specificity for IL-4, comprising an immunoglobulin single variable domain with binding specificity for human IL-4 and a non-human IL-4.

127. The ligand of claim 126, wherein said non-human IL-4 is selected from the group consisting of rhesus IL-4 and cynomolgous IL-4.

128. The ligand of claim 126, wherein the binding affinity of said immunoglobulin single variable domain for non-human IL-4 and the binding affinity for human IL-4 differ by no more than a factor of 10.

129. A ligand that has binding specificity for IL-13, comprising an immunoglobulin single variable domain with binding specificity for human IL-13 and a non-human IL-13.

130. The ligand of claim 129, wherein said non-human IL-13 is selected from the group consisting of rhesus IL-13 and cynomolgous IL-13.

131. The ligand of claim 129, wherein the binding affinity of said immunoglobulin single variable domain for non-human IL-13 and the binding affinity for human IL-13 differ by no more than a factor of 10.

132. A ligand that has binding specificity for IL-4 and IL-13, comprising the immunoglobulin single variable domain of claim 126; and an immunoglobulin single variable domain with binding specificity for human IL-13.

133. A ligand that has binding specificity for IL-4 and IL-13, comprising an immunoglobulin single variable domain with binding specificity for human IL-4; and the immunoglobulin single variable domain of claim 129.

134. (canceled)

The application's sequence listing, which the Patent Office published only in electronic form, follows.

SEQUENCE LISTING (2455 sequences)

SEQ ID NO: 1 - DNA, 348 bp, Homo sapiens
gaggtgcagctgttggagtctgggggaggcttggtacagcctggggggtccctgcgtctctcctgtgcagcctccggattcacctttgcaaagtatcgtatggcttgggtccgccaggctccagggaagggtctagagtgggtctcatcgattaatactctgggtactacgacatactacgcagactccgtgaagggccggttcaccatctcccgcgacaattccaagaacacgctgtatctgcaaatgaacagcctgcgtgccgaggacaccgcggtatattactgtgcgaaagatgatcctccgtttgactactggggtcagggaaccctggtcaccgtttcgagc

SEQ ID NO: 2 - DNA, 348 bp, Homo sapiens
gaggtgcagctgttggagtctgggggaggcttggtacagcctggggggtccctgcgtctctcctgtgcagcctccggattcacctttgagctgtataggatggcttgggtccgccaggctccagggaagggtctagagtgggtctcacagattgagcctgatggtgggggtacatactacgcagactccgtgaagggccggttcaccatctcccgcgacaattccaagaacacgctgtatctgcaaatgaacagcctgcgtgccgaggataccgcggtatattactgtgcgaaagatgagtttccttttgactactggggtcagggaaccctggtcaccgtttcgagc

SEQ ID NO: 3 - DNA, 348 bp, Homo sapiens
gaggtgcagctgttggagtctgggggaggcttggtacagcctggggggtccctgcgtctctcctgtgcagcctctggattcacctttaagaattatgcgatgggttgggtccgccaggctccagggaagggtctggagtgggtctcatatattccggatcatggtgttgatacatactacgcagactccgtgaagggccggttcaccatctcccgcgacaattccaagaacacgctgtatctgcaaatgaacagcctgcgtgccgaggacaccgcggtatattactgtgcgaaatcgttgggtcgttttgactactggggtcagggaaccctggtcaccgtctcgagc

SEQ ID NO: 4 - DNA, 348 bp, Homo sapiens
gaggtgcagctgttggagtctgggggaggcttggtacagcctggggggtccctgcgtctctcctgtgcagcctccggattcacctttagggattatagtatggggtgggtccgccaggctccagggaagggtctggagtgggtctcatttattacgcagcatggtagggatacatactacgcagactccgtgaagggccggttcaccatctcccgcgacaattccgagaacacgctgtatctgcaaatgaacagcctgcgtgccgaggacaccgcggtatattactgtgcgaaatctctgtcgaggtttgactactggggtcagggaaccctggtcaccgtctcgagc

SEQ ID NO: 5 - DNA, 347 bp, Homo sapiens
gaggtgcagctgttggagtctgggggaggcttggtacagcctggggggtccctgcgtctctcctgtgcagcctccggattcacctttggtcgttatatgatggtttgggtccgccaggctccagggaagggtctagagtgggtctcagctatttcgcctccgggtgattcgacatactacgcagactccgtgaagggccggttcaccatctcccgcgacaattccaagaacacgctgtatctgcaaatgaacagcctgcgtgccgaggacaccgcggtatattactgtgcgaaaagtcttggtaggtttgactactggggtcagggaaccctggtcaccgtccgagc

SEQ ID NO: 6 - DNA, 348 bp, Homo sapiens
gaggtgcagctgttggagtctgggggaggcttggtacagcctggggggtccctgcgtctctcctgtgcagcctccggattcacctttggtttgtattcgatggcgtgggtccgccaggctccagggaagggtctggagtgggtctcatttattacgtctaatggtcgttctacatactacgcagactccgtgaagggccggttcaccatctcccgcgacaattccaagaacacgctgtatctgcaaatgaacagcctgcgtgccgaggacaccgcggtatattactgtgcgaaaactctggggcggtttgactactggggtcagggaaccctggtcaccgtctcgagc

SEQ ID NO: 7 - DNA, 348 bp, Homo sapiens
gaggtgcagctgttggagtctgggggaggcttggtacagcctggggggtccctgcgtctctcctgtgcagcctccggattcacctttggtcgttatatgatggtttgggtccgccaggctccagggaagggtctagagtgggtctcagctatttcgcctccgggtgattcgacatactacgcagactccgtgaagggccggttcaccatctcccgcgacaattccaagaacacgctgtatctgcaaatgaacagcctgcgtgccgaggacaccgcggtatattactgtgcgaaaagtcttggtaggtttgactactggggtcagggaaccctggtcaccgtttcgagc

SEQ ID NO: 8 - DNA, 348 bp, Homo sapiens
gaggtgcagctgttggagtctgggggaggcttggtacagcctggggggtccctgcgtctctcctgtgcagcctccggattcacctttgaggagtatgggatggcttgggcccgccaggctccagggaagggtctggagtgggtctcatatattgtggctgatggtgcgcgtacatactacgcagactccgtgaagggccggttcaccatctcccgcgacaattccaagaacacgctgtatctgcaaatgaacagcctgcgtgccgaggacaccgcggtatattactgtgcgaaatcgttggggcggtttgactactggggtcagggaaccctggtcaccgtctcgagc

SEQ ID NO: 9 - DNA, 348 bp, Homo sapiens
gaggtgcagttgttggagtctgggggaggcttggtacagcctggggggtccctgcgtctctcctgtgcagcctccggattcacctttatgagttatcagatgaattgggtccgccaggctccagggaagggtctagagtgggtctcagctattagtcctgatggtgcgtttacatactacgcagactccgtgaagggccggttcaccatctcccgcgacaattccaagaacacgctgtatctgcaaatgaacagcctgcgtgccgaggacaccgcggtatattactgtgcgaaaagtcttggtaggtttgactactggggtcagggaaccctggtcaccgtctcgagc

SEQ ID NO: 10 - DNA, 348 bp, Homo sapiens
gaggtgcagctgttggagtctgggggaggcttggtacagcctggggggtccctgcgtctctcctgtgcagcctccggattcacctttcttcggtatggtatggggtgggtccgccaggctccagggaagggtctagagtgggtctcatggattgagccgagtggtcatagtacgtactacgcagactccgtgaagggccggttcaccatctcccgcgacaattccaagaacacgctgtatctgcaaatgaacagcctgcgtgccgaggacaccgcggtatattactgtgcgaaaagttatggtgcttttgactactggggccagggaaccctggtcaccgtctcgagc

SEQ ID NO: 11 - DNA, 348 bp, Homo sapiens
gaggtgcagctgttggagtctgggggaggcttggtacagcctggggggtccctgcgtctctcctgtgcagcctccggattcacctttggtcggtatgatatgtgttgggtccgccaggctccagggaagggtctagagtgggtctcagggattcattttgatggtatggagacatactacgcagactccgtgaagggccggttcaccatctcccgcgacaattccaagaacacgctgtatctgcaaatgaacagcctgcgtgccgaggacaccgcggtatattactgtgcgaaagatcagtggccgtttgactactggggtcagggaaccctggtcaccgtttcgagc

SEQ ID NO: 12 - DNA, 348 bp, Homo sapiens
gaggtgcagctgttggagtctgggggaggcttggtacagcctggggggtccctgcgtctctcctgtgcagcctccggattcacctttgcgaattatggtatgggttgggtccgccaggctccagggaagggtctagagtgggtctcatatattagtcctattggccctcgtacatactatgcagactccgtgaagggccggttcaccatctcccgcgacaattccaagaacacgctgtatctgcaaatgaacagcctgcgtgccgaggacaccgcggtatattactgtgcgaaaagttatggtgcttttgactactggggccagggaaccctggtcaccgtctcgagc

SEQ ID NO: 13 - DNA, 348 bp, Homo sapiens
gaggtgcagctgttggagtctgggggaggcttggtacagcctggggggtccctgcgtctctcctgtgcagcctccggattcacctttcggtggtatggtatgggttgggtccgccaggctccagggcagggtctggagtgggtctcatatattttgcctgggggttcggagacatactacgcagactccgtgaagggccggttcaccatctcccgcgacaattccaagaacacgctgtatctgcaaatgaacagcctgcgtgccgaggacaccgcggtatattactgtgcgaaaagttatggtgcttttgactactggggtcagggaaccctggtcaccgtctcgagc

SEQ ID NO: 14 - DNA, 348 bp, Homo sapiens
gaggtgcagctgttggagtctgggggaggcttggtacagcctggggggtccctgcgtctctcctgtgcagcctccggattcacctttgaggcgtatgggatgggttgggtccgccaggctccagggaagggtctagagtgggtctcatttattacttcgtctggtctttcgacatactacgcagactccgtgaagggccgattcaccatctcccgcgacaattccaagaacacgctgtatctgcaaatgaacagcctgcgtgccgaggataccgcggtatattactgtgcgaaatcgttgggtaggtttgactactggggtcagggaaccctggtcaccgtctcgagc

SEQ ID NO: 15 - DNA, 348 bp, Homo sapiens
gaggtgcagctgttggagtctgggggaggcttggtacagcctggggggtccctgcgtctctcctgtgcagcctccggattcacctttagggattattctatgggttgggtccgccaggctccagggaagggtctagagtgggtctcatatattgagactgagggtcgtcgtacatactacgcagactccgtgaagggccggttcaccatctcccgcgacaattccaagaacacgctgtatctgcaaatgaacagcctgcgtgccgaggacaccgcggtatattactgtgcgaaatcgctggggcgttttgactactggggtcagggaaccctggtcaccgtctcgagc

SEQ ID NO: 16 - DNA, 348 bp, Homo sapiens
gaggtgcagctgttggagtctgggggaggcttggtacagcctggggggtccctgcgtctctcctgtgcagcctccggattcaccttttctgagtatagtatggcgtgggtccgccaggctccagggaagggtctagagtgggtctcatatattccgcatgatggtatgcggacatactacgcagactccgtgaagggccggttcaccatctcccgcgacaattccaagaacacgctgtatctgcaaatgaacagcctgcgtgccgaggacaccgcggtatattactgtgcgaaatcgcttagtcgttttgactactggggtcagggaaccctggtcaccgtctcgagc

SEQ ID NO: 17 - DNA, 348 bp, Homo sapiens
gaggtgcagctgttggagtctgggggaggcttggtacagcctggggggtccctgcgtctctcctgtgcagcctccggattcacctttaagcagtatggtatggcttgggtccgccaggctccagggaagggtctagagtgggtctcatggattgatggtgttggtcttagtacatactacgcagactccgtgaagggccggttcaccatctcccgcgacaattccaagaacacgctgtatctgcaaatgaacagcctgcgtgccgaggacaccgcggtatattactgtgcgaaatcgctgtctcggtttgactactggggtcagggaaccctggtcaccgtctcgagc

SEQ ID NO: 18 - DNA, 348 bp, Homo sapiens
gaggtgcagctgttggagtctgggggaggcttggtacagcctggggggtccctgcgtctctcctgtgcagcctccggattcacctttgaggagtatgggatgggttgggtccgccaggctccagggaagggtctggagtgggtctcatggattcctgagggtggtaggaggacatactacgcagactccgtgaagggccggttcaccatctcccgcgacaattccaagaacacgctgtatctgcaaatgaacagcctgcgtgccgaggataccgcggtatattactgtgcgaaaaattattcgccttttgactactggggtcagggaaccctggtcaccgtctcgagc

SEQ ID NO: 19 - DNA, 348 bp, Homo sapiens
gaggtgcagctgttggagtctgggggaggcttggtacagcctggggggtccctgcgtctctcctgtgcagcctccggattcacctttgctgagtattcgatgaattgggtccgccaggctccagggaagggtctagagtgggtctcacatattaatgcggctggtaatcgtacatactacgcagactccgtgaagggccggttcaccatctcccgtgacaattccaagaacacgctgtatctgcaaatgaacagcctgcgtgccgaggacaccgcggtatattactgtgcgaaatctcttgggcggtttgactactggggtcagggaaccctggtcaccgtctcgagc

SEQ ID NO: 20 - DNA, 348 bp, Homo sapiens
gaggtgcagctgttggagtctgggggaggcttggtacagcctggggggtccctgcgtctctcctgtgcagcctccggattcacctttacgtcgtatggtatgggttgggtccgccaggctccagggaagggtctagagtgggtctcatatattctggcggcgggtaatgcgacctactacgcagactccgtgaagggccggttcaccatctcccgcgacaattccaagaacacgctgtatctgcaaatgaacagcctgcgtgccgaggacaccgcggtatattactgtgcgaaaagttatggtgcttttgactactggggccagggaaccctggtcaccgtttcgagc

SEQ ID NO: 21 - DNA, 348 bp, Homo sapiens
gaggtgcagctgttggagtctgggggaggcttggtacagcctggggggtccctgcgtctctcctgtgcagcctccggattcacctttcagagttatgcgatggggtgggtccgccaggctccagggaagggtctagagtgggtctcatatatttcgcctacgggtcatcatacatactacgcagactccgtgaagggccggttcaccatctcccgcgacaattccaagaacacgctgtatctgcaaatgaacagcctgcgtgccgaggacaccgcggtatattactgtgcgaaatcgcttggtcgttttgactactggggtcagggaaccccggtcaccgtttcgagc

SEQ ID NO: 22 - DNA, 348 bp, Homo sapiens
gaggtgcagctgttggagtctgggggaggcttggtacagcctggggggtccctgcgtctctcctgtgcagcctccggattcacctttgtgtcgtatcctatggggtgggtccgccaggctccagggaagggtcttgagtgggtctcatggattcctggtgatggtagtgctacatactacgcagactccgtgaagggccggttcaccatctcccgcgacaattccaagaacacgctgtatctgcaaatgaacagcctgcgtgccgaggacaccgcggtatattactgtgcgaaatctcttagtcgttttgactactggggtcagggaaccctggtcaccgtctcgagc

SEQ ID NO: 23 - DNA, 348 bp, Homo sapiens
gaggtgcagctgttggagtctgggggaggcttggtacagcctggggggtccctgcgtctctcctgtgcagcctccggattcacctttaatcattatggcatgggttgggtccgccaggctccagggaagggtctggagtgggtctcatatattacgtttccgggtttgcagacatactacgcagactccgtgaagggccggttcaccatctcccgcgacaattccaagaacacgctgtatctgcaaatgaacagcctgcgtgccgaggacaccgcggtatattactgtgcgaaaagttatggtgcttttgactactggggtcagggaaccctggtcaccgtctcgagc

SEQ ID NO: 24 - DNA, 348 bp, Homo sapiens
gaggtgcagctgctggagtctgggggaggcttggtacagcctggggggtccctgcgtctctcctgtgcagcctccggattcacctttatgtattatgggatgggttgggtccgccaggctccagggaagggtctagagtgggtctcatggattactgcgaatggtagttcgacatactacgcagactccgtgaagggccggttcaccatctcccgcgacaattccaagaacacgctgtatctgcaaatgaacagcctgcgtgccgaggacaccgcggtatattactgtgcgaaatctctgggtcgttttgactactggggtcagggaaccctggtcaccgtctcgagc

SEQ ID NO: 25 - DNA, 348 bp, Homo sapiens
gaggtgcagctgttggagtctgggggaggcttggtacagcctggggggtccctgcgtctctcctgtgcagcctccggattcacctttcgtaattatgggatggcgtgggtccgccaggctccagggaagggtctagagtgggtctcatggattgatgcgtctggtactgagacatactacgcagactccgtgaagggccggttcaccatctcccgcgacaattccaagaacacgctgtatctgcaaatgaacagcctgcgtgccgaggacaccgcggtatattactgtgcgaaaagtctggggcgttttgactactggggtcagggaaccctggtcaccgtctcgagc

SEQ ID NO: 26 - DNA, 348 bp, Homo sapiens
gaggtgcagctgttggagtctgggggaggcttggtacagcctggggggtccctgcgtctctcctgtgcagcctccggattcacctttcgtaattatgggatggcgtgggtccgccaggctccagggaagggtctagagtgggtctcatggattgatgcgtctggtactgagacatactacgcagactccgtgaagggccggttcaccatctcccgcgacaattccaagaacacgctgtatctgcaaatgaacagcctgcgtgccgaggacaccgcggtatattactgtgcgaaaagtctggggcgttttgactactggggtcagggaaccccggtcaccgtctcgagc

SEQ ID NO: 27 - DNA, 348 bp, Homo sapiens
gaggtgcagctgttggagtctgggggaggcttggtacagcctggggggtccctgcgtctctcctgtgcagcctccggattcacctttcgtaattatgggatggcgtgggtccgccaggctccagggaagggtctagagtgggtctcatggattgatgcgtctggtactgagacatattactcgagttccgtgaagggccggttcaccatctcccgcgacaattccaagaacacgctgtatctgcaaatgaacagcctgcgtgccgaggacaccgcggtatattactgtgcgaaaagtctggggcgttttgactactggggtcagggaaccctggtcaccgtctcgagc

SEQ ID NO: 28 - DNA, 348 bp, Homo sapiens
gaggtgcagctgttggagtctgggggaggcttggtacagactggggggtccctgcgtctctcctgtgcagcctccggattcacctttcgtaattatgggatggcgtgggtccgccaggctccagggaagggtctagagtgggtctcatggattgatgcgtctggtactgagacatactacgcagactccgtgaagggccggttcaccatctcccgcgacaattccaagaacacgctgtatctgcaaatgaacagcctgcgtgccgaggacaccgcggtatattactgtgcgaaaagtctggggcggtttgactactggggtcagggaaccctggtcaccgtctcgagc

SEQ ID NO: 29 - DNA, 348 bp, Homo sapiens
gaggtgcagctgttggagtctgggggaggcttggtacagcctggggggtccctgcgtctctcctgtgcagcctccggattcacctttcgtaattatgggacggcgtgggtccgccaggctccagggaagggtctagagtgggtctcatggattgatgcgtctggtactgagacatactacgcagactccgtgaagggccggttcaccatctcccgcgacaattccaagaacacgctgtatctgcaaatgaacagcctgcgtgccgaggacaccgcggtatattactgtgcgaaaagtctggggcgttttgactactggggtcagggaaccctggtcaccgtctcgagc

SEQ ID NO: 30 - DNA, 348 bp, Homo sapiens
gaggtgcagctgttggagtctgggggaggcttggtacagcctggggggtccctgcgtctctcctgtgcagcctccggattcacctttcgtaattatgggatggcgtgggtccgccaggctccagggaagggtctagagtgggtctcatggattgatgcgtctggtactgagacatactacgcagaccccgtgaagggccggatcaccatctcccgcgacaattccaagaacacgctgtatctgcaaatgaacagcctgcgtgccgaggacaccgcggtatattactgtgcgaaaagtctggggcgttttgattactggggtcagggaaccctggtcaccgtctcgagc

SEQ ID NO: 31 - DNA, 348 bp, Homo sapiens
gaggtgcagctgtcggagtctgggggaggcttggtacagcctggggggtccctgcgtctctcctgtgcagcctccggattcacctttcgtaattatgggatggcgtgggtccgccaggctccagggaagggtctagagtgggtctcatggattgatgcgtctggtactgagacatactacgcagactccgtgaagggccggttcaccatctcccgcgacaattccaagaacacgctgtatctgcaaatgaacagcctgcgtgccgaggacaccgcggtatattactgtgcgaaaagtctggggcgttttgactactggggtcagggaaccctggtcaccgtctcgagc

SEQ ID NO: 32 - DNA, 348 bp, Homo sapiens
gaggtgcagctgttggagtctgggggaggcttggtacagcctggggggtccctgcgtctctcctgtgcagtctccggattcacctttcgtaattatgggatggcgtgggtccgccaggctccagggaagggtctagagtgggtctcatggattgatgcgtctggtactgagacatactacgcagactccgtgaagggccggttcaccatctcccgcgacaattccaagaacacgctgtatctgcaaatgaacagcctgcgtgccgaggacaccgcggtatattactgtgcgaaaagtctggggcgttttgactactggggtcagggaaccctggtcaccgtctcgagc

SEQ ID NO: 33 - DNA, 348 bp, Homo sapiens
gaggtgcagctgttggagtctgggggaggcttggtacggcctggggggtccctgcgtctctcctgtgcagcctccggattcacctttcgtaattatgggatggcgtgggtccgccaggctccagggaagggtctagagtgggtctcatggattgatgcgtctggtactgagacatactacgcagactccgtgaagggccggttcaccatctcccgcgacaattccaagaacacgctgtatctgcaaatgaacagcctgcgtgccgaggacaccgcggtatattactgtgcgaaaagtctggggcgttttgattactggggtcagggaaccctggtcaccgtctcgagc

SEQ ID NO: 34 - DNA, 348 bp, Homo sapiens
  misc_feature 88, 195: n = A,T,C or G
gaggtgcagctgttggagtctgggggaggcttggtacagcctggggggtccctgcgtctctcctgtgcagcctccggattcacctttngtaattatgggatggcgtgggtccgccaggctccagggaagggtctagagtgggtctcatggatttatgcgtctggtactgagacatactacgcagactccgtgaanggccggttcaccatctcccgcgacaattccaagaacacgctgtatctgcaaatgaacagcctgcgtgccgaggacaccgcggtatattactgtgcgaaaagtctggggcgttttgactactggggtcagggaaaccctggtcacctctcgagc

SEQ ID NO: 35 - DNA, 348 bp, Homo sapiens
gaggtgcagctgttggagtctgggggaggcttggtacagcctggggggtccctgcgtctctcctgtgcagcctccggattcacctttcgtaattatgggatggcgtgggtccgccaggctccagggaagggtctagagtgggtctcatggattgatgcgtctggtactgagacatattacgcagactccgtgaagggccggttcaccttctcccgcgacaattccaagaacacgctgtatctgcaaatgaacagcctgcgtgccgaggacaccgcggtatattactgtgcgaaaagtctggggcgttttgactactggggtcagggaaccctggtcaccgtctcgagc

SEQ ID NO: 36 - DNA, 348 bp, Homo sapiens
gaggtgcagctgttggagtctgggggaggcttggtacagcctggggggtccctgcgtctctcctgtgcagcctccggattcacctttcgtaattatgggatggcgtgggtccgccaggctccagggaagggtctagagtgggtctcatggattgatgcgtctggtactgagacatactacgcagactccgtgaagggccggttaaccatctcccgcgacaattccaagaacacgctgtatctgcaaatgaacagcctgcgtgccgaggacaccgcggtatattactgtgcgaaaagtctggggcgttttgactactggggtcagggaaccctggtcaccgtctcgagc

SEQ ID NO: 37 - DNA, 348 bp, Homo sapiens
gaggtgcagctgttggagtctgggggaggcttggtacagcctggggggtccctgcgtctctcctgtgcagcctccggattcacctttcgtaattatgggatggcgtgggtccgccaggctccagggaagggtctagagtgggtctcatggattgatgcgtctggtactgagacatactacgcagacgccgtgaagggccggttcaccatctcccgcgacaattccaagaacacgctgtatctgcaaatgaacagcctgcgtgccgaggacaccgcggaatattactgtgcgaaaagtctggggcgttttgactactggggtcagggaaccctggtcaccgtctcgagc

SEQ ID NO: 38 - DNA, 348 bp, Homo sapiens
gaggtgcagctgttggagtctgggggaggcttggtacagcctggggggcccctgcgtctctcctgtgcagcctccggtttcacctttcgtaattatgggatggcgtgggtccgccaggctccagggaagggtctagagtgggtctcatggattgatgcgtctggtactgagacatactacgcagactccgtgaagggccggttcaccatctcccgcgacaattccaagaacacgctgtatctgcaaatgaacagcctgcgtgccgaggacaccgcggtatattactgtgcgaaaagtctggggcgctttgactactggggtcagggaaccctggtcaccgtctcgagc

SEQ ID NO: 39 - DNA, 348 bp, Homo sapiens
gaggtgcagctgttggagtctgggggaggcttggtacagcctggggggtccctgcgtctctcctgtgcagcctccggattcacctttcgtaattatgggatggcgtgggtccgccaggctccagggaagggtctagagtgggtctcatggattgatgcgtctggtactgagacatattacgcgacttccgtgaagggccggttcaccatctcccgcgacaattccaagaacacgctgtatctgcaaatgaacagcctgcgtgccgaggacaccgcggtatattactgtgcgaaaagtctggggcgttttgattactggggtcagggaaccctggtcaccgtttcgagc

SEQ ID NO: 40 - DNA, 348 bp, Homo sapiens
gaggtgcagctgttggactctgggggaggcttggtacagcctggggggtccctgcgtctctcctgtgcagcctccggattcacctttcgtaattatgggatggcgtgggtccgccaggctccagggaagggtctagagtgggtctcatggattgatgcgtctggtactgagacatactacgcagactccgtgaagggccggttcaccatctcccgcgacaattccaagaacacgctgtatctgcaaatgaacagcctgcgtgccgaggacaccgcggtatattactgtgcgaaaagtctggggcgttttgactactggggtcagggaaccctggtcaccgtctcgagc

SEQ ID NO: 41 - DNA, 348 bp, Homo sapiens
gaggtgcagctgttggagtctgggggaggcttggtacagcctggggggtccctgcgtctctcctgtgcagcctccggattcacctttcgtaattatgggatggcgtgggtccgccaggctccagggaagggtctagagtgggtctcatggattgatgcgtctggtactgagacatactacgcagactccgtgaagggccggttcaccatctcccgcgacaattacaagaacacgctgtatctgcaaatgaacagcctgcgtgccgaggacaccgcggtatattactgtgcgaaaagtctggggcgttttgactactggggtcagggaacccaggtcaccgtctcgagc

SEQ ID NO: 42 - DNA, 348 bp, Homo sapiens
  misc_feature 317, 325: n = A,T,C or G
gaggtgcagctgttggactctgggggaggcttggtacagcctggggggtccctgcgtctctcctgtgcagcctccggattcacctttcgtaattatgggatggcgtgggtccgccaggctccagggaagggtctagagtgggtctcatggattgatgcgtctggtactgagacatactacgcagactccgtgaagggccggttcaccatctcccgcgacaattccaagaacacgctgtatctgcaaatgaacagcctgcgtgccgaggacaccgcggtatattactgtgcgaaaagtctggggcgttttgactactngggtcagngaaccctggtcaccgtctcgagc

SEQ ID NO: 43 - DNA, 348 bp, Homo sapiens
gaggtgcagctgttggagtctgggggaggctcggtacagcctggggggtccctgcgtctctcctgtgcagcctccggattcacctttcgtaattatgggatggcgtgggtccgccaggctccagggaagggtctagagtgggtctcatggattgatgcgtctggtactgagacatactacgcagactccgtgaagggccggttcaccatctcccgcgacaattccaagaacacgctgtatctgcaaatgaacagcctgcgtgccgaggacaccgcggtatattactgtgcgaaaagtctggggcgttttgactactggggtcagggaaccctggttctcctctcgagc

SEQ ID NO: 44 - DNA, 348 bp, Homo sapiens
gaggtgcagctgttggagtctaggggaggcttggtacagcctggggggtccctgcgtctctcctgtgcagcctccggattcacctttcgtaattatgggatggcgtgggtccgccaggctccagggaagggtctagagtgggtctcatggattgatgcgtctggtactgagacatactacgcagactccgtgaagggccggttcaccatctcccgcgacaattccaagaacacgctgtatctgcaaatgaacagcctgcgtgccgaggacaccgcggtatattactgtgcgaaaagtctggggcgttttgactactggggtcagggaaccctggtcaccgtctcgagc

SEQ ID NO: 45 - DNA, 348 bp, Homo sapiens
gaggtgcagctgttggagtctgagggaggcttggtacagcctggggggtccctgcgtctctcctgtgcagcctccggattcacctttcgtaattatgggatggcgtgggtccgccaggctccagggaagggtctagagtgggtctcatggattgatgcgtctggtactgagacatactacgcagattccgtgaagggccggttcaccatctcccgcgacaattccaagaacacgctgtatctgcaaatgaacagcctgcgtgccgaggacaccgcggtatattactgtgcgaaaagtctggggcgttttgactactggggtcagggaaccctggtcaccgtctcgagc

SEQ ID NO: 46 - DNA, 348 bp, Homo sapiens
gaggtgcagctgttggagtatgggggaggcttggtacagcctggggggtccctgcgtctctcctgtgcagcctccggattcacctttcgtaattatgggatggcgtgggtccgccaggctccagggaagggtctagagtgggtctcatggattgatgcgtctggtactgagacatactacgcagactccgtgaagggccggttcaccatctcccgcgacaattccaagaacacgctgtatctgcaaatgaacagcctgcgtgccgaggacaccgcggtatattactgtgcgaaaagtctggggcgttttgactactggggtaagggaaccctggtcaccgtctcgagc

SEQ ID NO: 47 - DNA, 348 bp, Homo sapiens
gaggtgcagctgttggagtcttggggaggcttggtacagcctggggggtccctgcgtctctcctgtgcagcctccggattcacctttcgtaattatgggatggcgtgggtccgccaggctccagggaagggtctagagtggatctcatggattgatgcgtctggtactgagacatactacgcagaccccgtgaagggccggttcaccatctcccgcgacaattccaagaacacgctgtatctgcaaatgaacagcctgcgtgccgaggacaccgcggtatattactgtgcgaaaagtctggggcgttttgactactggggtcagggaaccctggtcaccgtctcgagc

SEQ ID NO: 48 - DNA, 348 bp, Homo sapiens
gaggtgcagctgttggagtctgggggaggcttggtacagcctggggggtccctgcgtctctcctgtgcagcctccggatacacctttcgtaattatgggatggcgtgggtccgccaggctccagggaagggtctagagtgggtctcatggattgatgcgtctggcactgagacatactacgcagactccgtgaagggccggttcacaatctcccgcgacaattccaagaacacgctgtatctgcaaatgaacagcctgcgtgccgaggacactgcggtatattactgtgcgaaaagtctggggcgttttgactactggggtcagggaaccctggtcaccgtctcgagc

SEQ ID NO: 49 - DNA, 348 bp, Homo sapiens
  misc_feature 20: n = A,T,C or G
gaggtgcagctgttggagtntgggggaggcttggtacagcctggggggtccctgcgtctctcctgtacagcctccggattcaccttccgtaactatgggatggcgtgggtccgccaggctccagggaagggtctagagtgggtctcatggattgatgcgtctggtactgagacatactacgcagactccgtgaagggccggttcaccatctcccgcgacaattccaagaacacgctgtatctgcaaatgaacagcctgcgtgccgaggacaccgcggtatattactgtgcgaaaagtctggggcgttttgactactggggtcagggaaccctggtcaccgtctcgagc

SEQ ID NO: 50 - DNA, 348 bp, Homo sapiens
gaggtgcagctgttggagtctgggggaggcttggtacagcctggggggtccctgcgtctctcctgtgcagcctccggattcacctttcgtaattatgggatggcgtgggtccgccaggctccagggaagggtctagagtgggtctcatggattgggcagtacggtgacgagacatactacgcagacttcgtgaagggccggttcaccatctcccgcgacaattccaagaacacgctgtatctgcaaatgaacagcctgcgtgccgaggacaccgcggtatattactgtgcgaaaagtctggggcgttttgactactggggtcagggaaccctggtcaccgtctcgagc

SEQ ID NO: 51 - DNA, 348 bp, Homo sapiens
  misc_feature 184: n = A,T,C or G
gaggtgcagctgttggagtctgggggaggcttggtacagcctggggggtccctgcgtctctcctgtgcagcctccggattcacctttcgtaattatgggatggcgtgggtccgccaggctccagggaagggtctagagtgggtctcatggatttcgccgtacggtagggagacatactacgcanacttcgtgaagggccggttcaccatctcccgcgacaattccaagaacacgctgtatctgcaaatgaacagcctgcgtgccgaggacaccgcggtatattactgtgcgaaaagtctggggcgttttgactactggggtcagggaaccctggtcaccgtctcgagc

SEQ ID NO: 52 - DNA, 348 bp, Homo sapiens
  misc_feature 184: n = A,T,C or G
gaggtgcagctgttggagtctgggggaggcttggtacagcctggggggtccctgcgtctctcctgtgcagcctccggattcacctttcgtaattatgggatggcgtgggtccgccaggctccagggaagggtctagagtgggtctcatggattgccgggtccggtagggagacatactacgcanacttcgtgaagggccggttcaccatctcccgcgacaattccaagaacacgctgtatctgcaaatgaacagcctgcgtgccgaggacaccgcggtatattactgtgcgaaaagtctggggcgttttgactactggggtcagggaaccctggtcaccgtctcgagc

SEQ ID NO: 53 - DNA, 348 bp, Homo sapiens
  misc_feature 184: n = A,T,C or G
gaggtgcagctgttggagtctgggggaggcttggtacagcctggggggtccctgcgtctctcctgtgcagcctccggattcacctttcgtaattatgggatggcgtgggtccgccaggctccagggaagggtctagagtgggtctcatggattgccgggccgggtaccgagacatactacgcanacttcgtgaagggccggttcaccatctcccgcgacaattccaagaacacgctgtatctgcaaatgaacagcctgcgtgccgaggacaccgcggtatattactgtgcgaaaagtctggggcgttttgactactggggtcagggaaccctggtcaccgtctcgagc

SEQ ID NO: 54 - DNA, 348 bp, Homo sapiens
  misc_feature 171, 184: n = A,T,C or G
gaggtgcagctgttggagtctggggggggcttggtacagcctggggggtccctgcgtctctcctgtgcagcctccggattcacctttgaccagtatgggatggcgtgggtccgccaggctccagggaagggtctagagtgggtctcatggattgatgcgtctggtactganacatactacgcanacaccgtgaagggccggttcaccctgtcccgcgacaattccaagaacacgctgtatctgcaaatgaacagcctgcgtgccgaggacaccgcggtatattactgtgcgaaaagtctggggcgttttgactactggggtcagggaaccctggtcaccgtctcgagc

SEQ ID NO: 55 - DNA, 348 bp, Homo sapiens
  misc_feature 184: n = A,T,C or G
gaggtgcagctgttggagtctgggggaggcttggtacagcctggggggtccctgcgtctctcctgtgcagcctccggattcaccttttggttgtatgggatggcgtgggtccgccaggctccagggaagggtctagagtgggtctcatggattgatgcgtctggtactgagacatactacgcanactccgtgaagggccggttcaccatctcccgcgacaattccaagaacgcgctgtatctgcaaatgaacagcctgcgtgccggggacaccgcggtatattactgtgcgaaaagtctggggcgttttgactactggggtcagggaaccctggtcaccgtctcgagc

SEQ ID NO: 56 - DNA, 348 bp, Homo sapiens
  misc_feature 184: n = A,T,C or G
gaggtgcagctgttggagtctgggggaggcttggtacagcctggggggtccctgcgtctctcctgtgcagcctccggattcacctttgggtactatgggatggcgtgggtccgccaggctccagggaagggtctagagtgggtctcatggattgatgcgtctggtactgagacatactacgcanaccacgtgaagggccggttcaccctctcccgcgacaattccaagaacacgctgtatctgcaaatgaacagcctgcgtgccgaggacaccgcggtatattactgtgcgaaaagtctggggcgttttgactactggggtcagggaaccctggtcaccgtctcgagc

SEQ ID NO: 57 - DNA, 348 bp, Homo sapiens
  misc_feature 184: n = A,T,C or G
gaggtgcagctgttggagtctgggggaggcttggtacagcctggggggtccctgcgtctctcctgtgcagcctccggattcacctttttcggctatgggatggcgtgggtccgccaggctccagggaagggtctagagtgggtctcatggattgatgcgtctggtactgagacatactacgcanacagggtgaagggccggttcaccgtctcccgcgacaattccaagaacacgctgtatctgcaaatgaacagcctgcgtgccgaggacaccgcggtatattactgtgcgaaaagtctggggcgttttgactactggggtcagggaaccctggtcaccgtctcgagc

SEQ ID NO: 58 - DNA, 348 bp, Homo sapiens
  misc_feature 9, 184, 228: n = A,T,C or G
gaggtgcanctgttggagtctgggggaggcttggtacagcctggggggtccctgcgtctctcctgtgcagcctccggattcacctttagcgactatgggatggcgtgggtccgccaggctccagggaagggtctagagtgggtctcatggattgatgcgtctggtactgagacatactacgcanacccggtgaagggccggttcaccttgtcccgcgacaattccaanaacacgctgtatctgcaaatgaacagcctgcgtgccgaggacaccgcggtatattactgtgcgaaaagtctggggcgttttgactactggggtcagggaaccctggtcaccgtctcgagc

SEQ ID NO: 59 - DNA, 348 bp, Homo sapiens
  misc_feature 184: n = A,T,C or G
gaggtgcagctgttggagtctgggggaggcttggtacagcctggggggtccctgcgtctctcctgtgcagcctccggattcacctttttcctctatgggatggcgtgggtccgccaggctccagggaagggtctagagtgggtctcatggattgatgcgtctggtactgagacatactacgcanaccccgtgaagggccggttcaccatctcccgcgacaattccaagaacacgctgtatctgcaaatgaacagcctgcgtgccgaggacaccgcggtatattactgtgcgaaaagtctggggcgttttgactactggggtcagggaaccctggtcaccgtctcgagc

SEQ ID NO: 60 - DNA, 348 bp, Homo sapiens
  misc_feature 9, 89, 184, 228: n = A,T,C or G
gaggtgcanctgttggagtctgggggaggcttggtacagcctggggggtccctgcgtctctcctgtgcagcctccggattcacctttanctactatgggatggcgtgggtccgccaggctccagggaagggtctagagtgggtctcatggattgatgcgtctggtactgagacatactacgcanacaaggtgaagggccggttcaccctgtcccgcgacaattccaanaacacgctgtatctgcaaatgaacagcctgcgtgccgaggacaccgcggtatattactgtgcgaaaagtctggggcgttttgactactggggtcagggaaccctggtcaccgtctcgggc

SEQ ID NO: 61 - DNA, 348 bp, Homo sapiens
  misc_feature 184: n = A,T,C or G
gaggtgcagctgttggagtctgggggaggcttggtacagcctggggggtccctgcgtctctcctgtgcagcctccggattcaccttttccaactatgggatggcgtgggtccgccaggctccagggaagggtctagagtgggtctcatggattgatgcgtctggtactgagacatactacgcanacatggtgaagggccggttcaccgtctcccgcgacaattccaagaacacgctgtatctgcaaatgaacagcctgcgtgccgaggacaccgcggtatattactgtgcgaaaagtctggggcgttttgactactggggtcagggaaccctggtcaccgtctcgagc

SEQ ID NO: 62 - DNA, 348 bp, Homo sapiens
  misc_feature 184: n = A,T,C or G
gaggtgcagctgttggagtctgggggaggcttggtacagcctggggggtccctgcgtctctcctgtgcagcctccggattcacctttggggagtatgggatggcgtgggtccgccaggctccagggaagggtctggagtgggtctcatggattgatgcgtctggtactgagacatactacgcanacccggtgaagggccggttcaccttgtcccgcgacaattccaagaacgcgctgtatctgcaaatgaacagcctgcgtgccgaggacaccgcggtatattactgtgcgaaaagtctggggcgttttgactactggggtcagggaaccctggtcaccgtctcgagc

SEQ ID NO: 63 - DNA, 348 bp, Homo sapiens
  misc_feature 184: n = A,T,C or G
gaggtgcagctgttggagtctgggggaggcttggtacagcctggggggtccctgcgtctctcctgtgcagcctccggattcacctttaagcactatgggatggcgtgggtccgccaggctccagggaagggtctagagtgggtctcatggattgatgcgtctggtactgagacatactacgcanactcggtgaagggccggttcaccttgtcccgcgacaattccaagaacacgctgtatctgcaaatgaacagcctgcgtgccgaggacaccgcggtatattactgtgcgaaaagtctggggcgttttgactactggggtcagggaaccctggtcaccgtctcgagc

SEQ ID NO: 64 - DNA, 348 bp, Homo sapiens
  misc_feature 171, 184, 187: n = A,T,C or G
gaggtgcagctgttggagtctgggggaggcttggtacagcctggggggtccctgcgtctctcctgtgcagcctccggattcacctttccgtactatgggatggcgtgggtccgccaggctccagggaagggtctagagtgggtctcatggattgatgcgtctggtactganacatactacgcanacncggtgaagggccggttcaccttgtcccgcgacaattccaagaacacgctgtatctgcaaatgaacagcctgcgtgccgaggacaccgcggtatattactgtgcgaaaagtctggggcgttttgactactggggtcagggaaccctggtcaccgtctcgagc

SEQ ID NO: 65 - DNA, 348 bp, Homo sapiens
gaggtgcagctgttggagtctgggggaggcttggtacagcctggggggtccctgcgtctctcctgtgcagcctccggattcacctttaggaagtatgggatggcgtgggtccgccaggctccagggaagggtctagagtgggtctcatggattgatgcgtctggtactgagacatactacgcagacacggtgaagggccggttcaccatctcccgcgacaattccaagaacacgctgtatctgcaaatgaacagcctgcgtgccgaggacaccgcggtatattactgtgcgaaaagtctggggcgttttgactactggggtcagggaaccctggtcaccgtctcgagc

SEQ ID NO: 66 - DNA, 348 bp, Homo sapiens
  misc_feature 184: n = A,T,C or G
gaggtgcagctgttggagtctgggggaggcttggtacagcctggggggtccctgcgtctctcctgtgcagcctccggattcacctttctgatgtatgggatggcgtgggtccgccaggctccagggaagggtctagagtgggtctcatggattgatgcgtctggtactgagacatactacgcanaccccgtgaagggccggttcaccatctcccgcgacaattccaagaacacgctgtatctgcaaatgaacagcctgcgtgccgaggacaccgcggtatattactgtgcgaaaagtctggggcgttttgactactggggtcagggaaccctggtcaccgtctcgagc

SEQ ID NO: 67 - DNA, 348 bp, Homo sapiens
  misc_feature 9: n = A,T,C or G
gaggtgcanctgttggagtctgggggaggcttggtacagcctggggggtccctgcgtctctcctgtgcagcctccggattcacctttaacaactatgggatggcgtgggtccgccaggctccagggaagggtctagagtgggtctcatggattgatgcgtctggtactgagacatactacgcagacacggtgaagggccggttcaccatgtcccgcgacaattccaagaacacgctgtatctgcaaatgaacagcctgcgtgccgaggacaccgcggtatattactgtgcgaaaagtctggggcgttttgactactggggtcagggaaccctggtcaccgtctcgagc

SEQ ID NO: 68 - DNA, 348 bp, Homo sapiens
  misc_feature 184, 187: n = A,T,C or G
gaggtgcagctgttggagtctgggggaggcttggtacagcctggggggtccctgcgtctctcctgtgcagcctccggattcacctttggcgagtatgggatggcgtgggtccgccaggctccagggaagggtctagagtgggtctcatggattgatgcgtctggtactgagacatactacgcanacnacgtgaagggccggttcaccatctcccgcgacaattccaagaacacgctgtatctgcaaatgaacagcctgcgtgccgaggacaccgcggtatattactgtgcgaaaagtctggggcgttttgactactggggtcagggaaccctggtcaccgtctcgagc

SEQ ID NO: 69 - DNA, 348 bp, Homo sapiens
  misc_feature 9, 155, 184: n = A,T,C or G
gaggtgcanctgttggagtctgggggaggcttggtacagcctggggggtccctgcgtctctcctgtgcagcctccggattcacctttcgtaattatgggatggcgtgggtccgccaggctccagggaagggtctagagtgggtctcatggattancggctcgggtagggagacatactacgcanacttcgtgaagggccggttcaccatctcccgcgacaattccaagaacacgctgtatctgcaaatgaacagcctgcgtgccgaggacaccgcggtatattactgtgcgaaaagtctggggcgttttgactactggggtcagggaaccctggtcaccgtctcgagc

SEQ ID NO: 70 - DNA, 348 bp, Homo sapiens
  misc_feature 169, 184: n = A,T,C or G
gaggtgcagctgttggagtctgggggaggcttggtacagcctggggggtccctgcgtctctcctgtgcagcctccggattcacctttcgtaattatgggatggcgtgggtccgccaggctccagggaagggtctagagtgggtctcatggattagcgggcggggttacnagacatactacgcanacttcgtgaagggccggttcaccatctcccgcgacaattccaagaacacgctgtatctgcaaatgaacagcctgcgtgccgaggacaccgcggtatattactgtgcgaaaagtctggggcgttttgactactggggtcagggaaccctggtcaccgtctcgagc

SEQ ID NO: 71 - DNA, 348 bp, Homo sapiens
  misc_feature 184: n = A,T,C or G
gaggtgcagctgttggagtctgggggaggcttggtacagcctggggggtccctgcgtctctcctgtgcagcctccggattcacctttcgtaattatgggatggcgtgggtccgccaggctccagggaagggtctagagtgggtctcatggatttcgagctcgggtggggagacatactacgcanacttcgtgaagggccggttcaccatctcccgcgacaattccaagaacacgctgtatctgcaaatgaacagcctgcgtgccgaggacaccgcggtatattactgtgcgaaaagtctggggcgttttgactactggggtcagggaaccctggtcaccgtctcgagc

SEQ ID NO: 72 - DNA, 348 bp, Homo sapiens
  misc_feature 159: n = A,T,C or G
gaggtgcagctgttggagtctgggggaggcttggtacagcctggggggtccctgcgtctctcctgtgcagcctccggattcacctttcgtaattatgggatggcgtgggtccgccaggctccagggaagggtctagagtgggtctcatggatttcggcnaacggtagggagacatactacgcagacttcgtgaagggccggttcaccatctcccgcgacaattccaagaacacgctgtatctgcaaatgaacagcctgcgtgccgaggacaccgcggtatattactgtgcgaaaagtctggggcgttttgactactggggtcagggaaccctggtcaccgtctcgagc

SEQ ID NO: 73 - DNA, 348 bp, Homo sapiens
  misc_feature 184: n = A,T,C or G
gaggtgcagctgttggagtctgggggaggcttggtacagcctggggggtccctgcgtctctcctgtgcagcctccggattcacctttcgtaattatgggatggcgtgggtccgccaggctccagggaagggtctagagtgggtctcatggatttccgggaagggtctcgagacatactacgcanacttcgtgaagggccggttcaccatctcccgcgacaattccaagaacacgctgtatctgcaaatgaacagcctgcgtgccgaggacaccgcggtatattactgtgcgaaaagtctggggcgttttgactactggggtcagggaaccctggtcaccgtctcgagc

SEQ ID NO: 74 - DNA, 348 bp, Homo sapiens
  misc_feature 184: n = A,T,C or G
gaggtgcagctgttggagtctgggggaggcttggtacagcctggggggtccctgcgtctctcctgtgcagcctccggattcacctttcgtaattatgggatggcgtgggtccgccaggctccagggaagggtctagagtgggtctcatggattcaggccaacggtggcgagacatactacgcanacttcgtgaagggccggttcaccatctcccgcgacaattccaagaacacgctgtatctgcaaatgaacagcctgcgtgccgaggacaccgcggtatattactgtgcgaaaagtctggggcgttttgactactggggtcagggaaccctggtcaccgtctcgagc

SEQ ID NO: 75 - DNA, 348 bp, Homo sapiens
  misc_feature 184: n = A,T,C or G
gaggtgcagctgttggagtctgggggaggcttggtacagcctggggggtccctgcgtctctcctgtgcagcctccggattcacctttcgtaattatgggatggcgtgggtccgccaggctccagggaagggtctggagtgggtctcatggattcactcgtccggtagcgagacatactacgcanacttcgtgaagggccggttcaccatctcccgcgacaattccaagaacacgctgtatctgcaaatgaacagcctgcgtgccgaggacaccgcggtatattactgtgcgaaaagtctggggcgttttgactactggggtcagggaaccctggtcaccgtctcgagc

SEQ ID NO: 76 - DNA, 348 bp, Homo sapiens
  misc_feature 184: n = A,T,C or G
gaggtgcagctgttggagtctgggggaggcttggtacagcctggggggtccctgcgtctctcctgtgcagcctccggattcacctttcgtaattatgggatggcgtgggtccgccaggctccagggaagggtctagagtgggtctcatggattgacggcaggggtagcgagacatactacgcanacttcgtgaagggccggttcaccatctcccgcgacaattccaagaacacgctgtatctgcaaatgaacagcctgcgtgccgaggacaccgcggtatattactgtgcgaaaagtctggggcgttttgactactggggtcagggaaccctggtcaccgtctcgagc

SEQ ID NO: 77 - DNA, 348 bp, Homo sapiens
  misc_feature 184: n = A,T,C or G
gaggtgcagctgttggagtctgggggaggcttggtacagcctggggggtccctgcgtctctcctgtgcagcctccggattcacctttcgtaattatgggatggcgtgggtccgccaggctccagggaagggtctggagtgggtctcatggattaacggcaggggttcggagacatactacgcanacttcgtgaagggccggttcaccatctcccgcgacaattccaagaacacgctgtatctgcaaatgaacagcctgcgtgccgaggacaccgcggtatattactgtgcgaaaagtctggggcgttttgactactggggtcagggaaccctggtcaccgtctcgagc

SEQ ID NO: 78 - DNA, 348 bp, Homo sapiens
  misc_feature 184: n = A,T,C or G
gaggtgcagctgttagagtctggggggggcttggtacagcctggggggtccctgcgtctctcctgtgcagcctccggattcacctttcgtaattatgggatggcgtgggtccgccaggctccagggaagggtctagagtgggtctcatggattagcgggaggggttcggagacatactacgcanacttcgtgaagggccggttcaccatctcccgcgacaattccaagaacacgctgtatctgcaaatgaacagcctgcgtgccgaggacaccgcggtatattactgtgcgaaaagtctggggcgttttgactactggggtcagggaaccctggtcaccgtctcgagc

SEQ ID NO: 79 - DNA, 348 bp, Homo sapiens
  misc_feature 9, 184: n = A,T,C or G
gaggtgcanctgttggagtctgggggaggcttggtacagcctggggggtccctgcgtctctcctgtgcagcctccggattcacctttcgtaattatgggatggcgtgggtccgccaggctccagggaagggtctagagtgggtctcatggattcactccttgggtggggagacatactacgcanacttcgtgaagggccggttcaccatctcccgcgacaattccaagaacacgctgtatctgcaaatgaacagcctgcgtgccgaggacaccgcggtatattactgtgcgaaaagtctggggcgttttgactactggggtcagggaaccctggtcaccgtctcgagc

SEQ ID NO: 80 - DNA, 348 bp, Homo sapiens
  misc_feature 184: n = A,T,C or G
gaggtgcagctgttggagtctgggggaggcttggtacagcctggggggtccctgcgtctctcctgtgcagcctccggattcacctttcgtaattatgggatggcgtgggtccgccaggctccagggaagggtctagagtgggtctcatggattgcgggcaacggtcaggagacatactacgcanacttcgtgaagggccggttcaccatctcccgcgacaattccaagaacacgctgtatctgcaaatgaacagcctgcgtgccgaggacaccgcggtatattactgtgcgaaaagtctggggcgttttgactactggggtcagggaaccctggtcaccgtctcgagc

SEQ ID NO: 81 - DNA, 348 bp, Homo sapiens
gaggtgcagctgttggagtctgggggaggcttggtacagcctggggggtccctgcgtctctcctgtgcagcctccggattcacctttcgtaattatgggatggcgtgggtccgccaggctccagggaagggtctggagtgggtctcatggattaacagcaacggtagggagacatactacgcagacttcgtgaagggccggttcaccatctcccgcgacaattccaagaacacgctgtatctgcaaatgaacagcctgcgtgccgaggacaccgcggtatattactgtgcgaaaagtctggggcgttttgactactggggtcagggaaccctggtcaccgtctcgagc

SEQ ID NO: 82 - DNA, 348 bp, Homo sapiens
  misc_feature 184: n = A,T,C or G
gaggtgcagctgttggagtctgggggaggcttggtacagcctggggggtccctgcgtctctcctgtgcagcctccggattcacctttcgtaattatgggatggcgtgggtccgccaggctccagggaagggtctagagtgggtctcatggattgacgggtacggtaaggagacatactacgcanacttcgtgaagggccggttcaccatctcccgcgacaattccaagaacacgctgtatctgcaaatgaacagcctgcgtgccgaggacaccgcggtatattactgtgcgaaaagtctggggcgttttgactactggggtcagggaaccctggtcaccgtctcgagc

SEQ ID NO: 83 - DNA, 348 bp, Homo sapiens
  misc_feature 184: n = A,T,C or G
gaggtgcagctgttggagtctgggggaggcttggtacagcctggggggcccctgcgtctctcctgtgcagcctccggattcacctttcggacgtatgggatggcgtgggtccgccaggctccagggaagggtctagagtgggtctcatggattgatgcgtctggtactgagacatactacgcanacaacgtgaagggccggttcaccatctcccgcgacaattccaagaacacgctgtatctgcaaatgaacagcctgcgtgccgaggacaccgcggtatattactgtgcgaaaagtctggggcgttttgactactggggtcagggaaccctggtcaccgtctcgagc

SEQ ID NO: 84 - DNA, 348 bp, Homo sapiens
  misc_feature 184: n = A,T,C or G
gaggtgcagctgttggagtctgggggaggcttggtacagcctggggggtccctgcgtctctcctgtgcagcctccggattcaccttttggtactatgggatggcgtgggtccgccaggctccagggaagggtctagagtgggtctcatggattgatgcgtctggtactgagacatactacgcanacaccgtgaagggccggttcaccctgtcccgcgacaattccaagaacacgctgtatctgcaaatgaacagcctgcgtgccgaggacaccgcggtatattactgtgcgaaaagtctggggcgttttgactactggggtcagggaaccctggtcaccgtctcgagc

SEQ ID NO: 85 - DNA, 348 bp, Homo sapiens
  misc_feature 184: n = A,T,C or G
gaggtgcagctgttggagtctgggggaggcttggtacagcctggggggtccctgcgtctctcctgtgcagcctccggattcacctttaacgggtatgggatggcgtgggtccgccaggctccagggaagggtctagagtgggtctcatggattgatgcgtctggtactgagacatactacgcanacaccgtgaagggccggttcaccctctcccgcgacaattccaagaacacgctgtatctgcaaatgaacagcctgcgtgccgaggacaccgcggtatattactgtgcgaaaagtctggggcgttttgactactggggtcagggaaccctggtcaccgtctcgagc

SEQ ID NO: 86 - DNA, 348 bp, Homo sapiens
  misc_feature 187: n = A,T,C or G
gaggtgcagctgttggagtctgggggaggcttggtacagcctggggggtccctgcgtctctcctgtgcagcctccggattcacctttagcgagtatgggatggcgtgggtccgccaggctccagggaagggtctagagtgggtctcatggattgatgcgtctggtactgagacatactacgcagacnacgtgaagggccggttcaccatctcccgcgacaattccaagaacacgctgtatctgcaaatgaacagcctgcgtgccgaggacaccgcggtatattactgtgcgaaaagtctggggcgttttgactactggggtcagggaaccctggtcaccgtctcgagc

SEQ ID NO: 87 - DNA, 348 bp, Homo sapiens
  misc_feature 184: n = A,T,C or G
gaggtgcagctgttggagtctgggggaggcttggtacagcctggggggtccctgcgtctctcctgtgcagcctccggattcacctttggcgcgtatgggatggcgtgggtccgccaggctccagggaagggtctagagtgggtctcatggattgatgcgtctggtactgagacatactacgcanacccggtgaagggccggttcaccatgtcccgcgacaattccaagaacacgctgtatctgcaaatgaacagcctgcgtgccgaggacaccgcggtatattactgtgcgaaaagtctggggcgttttgactactggggtcagggaaccctggtcaccgtctcgagc

SEQ ID NO: 88 - DNA, 348 bp, Homo sapiens
  misc_feature 9, 90, 171, 184: n = A,T,C or G
gaggtgcanctgttggagtctgggggaggcttggtacagcctggggggtccctgcgtctctcctgtgcagcctccggattcacctttcancagtatgggatggcgtgggtccgccaggctccagggaagggtctagagtgggtctcatggattgatgcgtctggtactganacatactacgcanacaccgtgaagggccggttcacctcctcccgcgacaattccaagaacacgctgtatctgcaaatgaacagcctgcgtgccgaggacaccgcggtatattactgtgcgaaaagtctggggcgttttgactactggggtcagggaaccctggtcaccgtctcgagc

SEQ ID NO: 89 - DNA, 348 bp, Homo sapiens
  misc_feature 91, 171, 184: n = A,T,C or G
gaggtgcagctgttggagtctgggggaggcttggtacagcctggggggtccctgcgtctctcctgtgcagcctccggattcacctttttcnactatgggatggggtgggtccgccaggctccagggaagggtctagagtgggtctcatggattgatgcgtctggtactganacatactacgcanaccccgtgaagggccggttcacctcgtcccgcgacaattccaagaacacgctgtatctgcaaatgaacagcctgcgtgccgaggacaccgcggtatattactgtgcgaaaagtctggggcgttttgactactggggtcagggaaccctggtcaccgtctcgagc

SEQ ID NO: 90 - DNA, 348 bp, Homo sapiens
  misc_feature 184: n = A,T,C or G
gaggtgcagctgttggagtctgggggaggcttggtacagcctggggggtccctgcgtctctcctgtgcagcctccggattcacctttcgcgtctatgggatggcgtgggtccgccaggctccagggaagggtctagagtgggtctcatggattgatgcgtctggtactgagacatactacgcanaccccgtgaagggccggttcaccatctcccgcgacaattccaagaacacgctgtatctgcaaatgaacagcctgcgtgccgaggacaccgcggtatattactgtgcgaaaagtctggggcgttttgactactggggtcagggaaccctggtcaccgtctcgagc

SEQ ID NO: 91 - DNA, 348 bp, Homo sapiens
gaggtgcagctgttggagtctgggggaggcttggtacagcctggggggtccctgcgtctctcctgtgcagcctccggattcacctttccctcctatgggatggcgtgggtccgccaggctccagggaagggtctagagtgggtctcatggattgatgcgtctggtactgagacatactacgcagacaccgtgaagggccggttcaccttgtcccgcgacaattccaagaacacgctgtatctgcaaatgaacagcctgcgtgccgaggacaccgcggtatattactgtgcgaaaagtctggggcgttttgactactggggtcagggaaccctggtcaccgtctcgagc

SEQ ID NO: 92 - DNA, 348 bp, Homo sapiens
  misc_feature 184, 228: n = A,T,C or G
gaggtgcagctgttggagtctgggggaggcttggtacagcctggggggtccctgcgtctctcctgtgcagcctccggattcacctttggctcgtatgggatggcgtgggtccgccaggctccagggaagggtctagagtgggtctcatggattgatgcgtctggtactgagacatactacgcanacttggtgaagggccggttcaccatctcccgcgacaattctaanaacacgctgtatctgcaaatgaacagcctgcgtgccgaggacaccgcggtatattactgtgcgaaaagtctggggcgttttgactactggggtcagggaaccctggtcaccgtctcgagc

SEQ ID NO: 93 - DNA, 348 bp, Homo sapiens
  misc_feature 184: n = A,T,C or G
gaggtgcagctgttggagtctgggggaggcttggtacagcctggggggtccctgcgtctctcctgtgcagcctccggattcacctttgaccactatgggatggcgtgggtccgccaggctccagggaagggtctagagtgggtctcatggattgacgcgtctggtactgagacatactacgcanacagcgtgaagggccggttcaccgtgtcccgcgacaattccaagaacacgctgtatctgcaaatgaacagcctgcgtgccgaggacaccgcggtatattactgtgcgaaaagtctggggcgttttgactactggggtcagggaaccctggtcaccgtctcgagc

SEQ ID NO: 94 - DNA, 348 bp, Homo sapiens
gaggtgcagctgttggagtctgggggaggcttggtacagcctggggggtccctgcgtctctcctgtgcagcctccggattcacctttgaccactatgggatggcgtgggtccgccaggctccagggaagggtctagagtgggtctcatggattgatgcgtctggtactgagacatactacgcagacaccgtgaagggccggttcacctcctcccgcgacaattccaagaacgcgctgtatctgcaaatgaacagcctgcgtgccgaggacaccgcggtatattactgtgcgaaaagtctggggcgttttgactactggggtcagggaaccctggtcaccgtctcgagc

SEQ ID NO: 95 - DNA, 348 bp, Homo sapiens
  misc_feature 184: n = A,T,C or G
gaggtgcagctgttggagtctgggggaggcttggtacagcctggggggtccctgcgtctctcctgtgcagcctccggattcacctttttctcctatgggatggcgtgggtccgccaggctccagggaagggtctagagtgggtctcatggattgatgcgtctggtactgagacatactacgcanacccggtgaagggccggttcaccttgtcccgcgacaattccaagaacacgctgtatctgcaaatgaacagcctgcgtgccgaggacaccgcggtatattactgtgcgaaaagtctggggcgttttgactactggggtcagggaaccctggtcaccgtctcgagc

SEQ ID NO: 96 - DNA, 348 bp, Homo sapiens
  misc_feature 184: n = A,T,C or G
gaggtgcagctgttggagtctgggggaggcttggtacagcctggggggtccctgcgtctctcctgtgcagcctccggattcacctttaggggctatgggatggcgtgggtccgccaggctccagggaagggtctagagtgggtctcatggattgatgcgtctggtactgagacatactacgcanacacggtgaagggccggttcaccgtctcccgcgacaattccaagaacacgctgtatctgcaaatgaacagcctgcgtgccgaggacaccgcggtatattactgtgcgaaaagtctggggcgttttgactactggggtcagggaaccctggtcaccgtctcgagc

SEQ ID NO: 97 - DNA, 348 bp, Homo sapiens
  misc_feature 184: n = A,T,C or G
gaggtgcagctgttggagtctgggggaggcttggtacagcctggggggtccctgcgtctctcctgtgcagcctccggattcacctttcgtaattatgggatggcgtgggtccgccaggctccagggaagggtctggagtgggtctcatggattgccgcgcagggtcgggagacatactacgcanacttcgtgaagggccggttcaccatctcccgcgacaattccaagaacacgctgtatctgcaaatgaacagcctgcgtgccgaggacaccgcggtatattactgtgcgaaaagtctggggcgttttgactactggggtcagggaaccctggtcaccgtctcgagc

SEQ ID NO: 98 - DNA, 348 bp, Homo sapiens
gaggtgcagctgttggagtctgggggaggcttggtacagcctggggggtccctgcgtctctcctgtgcagcctccggattcacctttcgtaattatgggatggcgtgggtccgccaggctccagggaagggtctagagtgggtctcatggattgatgcgtctggtactgagacatactacgcagactccgtgaagggccggttcaccatctcccgcgacaattccaagaacacgctgtatctgcaaatgaacagcctgcgtgccgaggataccgcggtatattactgtgcgaaagagctggggcgttttgactactggggtcagggaaccctggtcaccgtctcgagc

SEQ ID NO: 99 - DNA, 348 bp, Homo sapiens
gaggtgcagctgttggagtctgggggaggcttggtacagcctggggggtccctgcgtctctcctgtgcagcctccggattcacctttcgtaattatgggatggcgtgggtccgccaggctccagggaagggtctagagtgggtctcatggattgatgcgtctggtactgagacgtactacgcagactccgtgaagggccggttcaccatctcccgcgacaattccaagaacacgctgtatctgcaaatgaacagcctgcgtgccgaggacaccgcggtatattactgtgcgaaacctctggggcgttttgactactggggtcagggaaccctggtcaccgtctcgagc

SEQ ID NO: 100 - DNA, 348 bp, Homo sapiens
gaggtgcagctgttggagtctgggggaggcttggtacagcctggggggtccctgcgtctctcctgtgcagcctccggattcacctttcgtaattatgggatggcgtgggtccgccaggctccagggaagggtctagagtgggtctcatggattgatgcgtctggtactgagacatactacgcagactccgtgaagggccggttcaccatctcccgcgacaattccaagaacacgctgtatctgcaaatgaacagcctgcgtgccgaggacaccgcggtaattactgtgcgaaatggctggggcgttttgactactggggtcagggaaccctggtcaccgtctcgagcg

SEQ ID NO: 101 - DNA, 348 bp, Homo sapiens
gaggtgcagctgttggagtctgggggaggcttggtacagcctggggggtccctgcgtctctcctgtgcagcctccggattcacctttcgtaattatgggatggcgtgggtccgccaggctccagggaagggtctagagtgggtctcatggattgatgcgtctggtactgagacatactacgcagactccgtgaagggccggttcaccatctcccgcgacaattccaagaacacgctgtatctgcaaatgaacagcctgcgtgccgaggacaccgcggtatattactgtgcgaaaacgttggggcgttttgactactggggtcagggaaccctggtcaccgtctcgagc

SEQ ID NO: 102 - DNA, 348 bp, Homo sapiens
gaggtgcagctgttggagtctgggggaggcttggtacagcctggggggtccctgcgtctctcctgtgcagcctccggattcacctttcgtaattatgggatggcgtgggtccgccaggctccagggaagggtctagagtgggtctcatggattgatgcgtctggtactgagacatactacgcagactccgtgaagggccggttcaccatctcccgcgacaattccaagaacacgctgtatctgcaaatgaacagcctgcgtgccgaggacaccgcggtatattactgtgcgaaagggctggggcgttttgactactggggtcagggaaccctggtcaccgtctcgagc

SEQ ID NO: 103 - DNA, 348 bp, Homo sapiens
gaggtgcagctgttggagtctgggggaggcttggtacagcctggggggtccctgcgtctctcctgtgcagcctccggattcacctttcgtaattatgggatggcgtgggtccgccaggctccagggaagggtctagagtgggtctcatggattgatgcgtctggtactgagacatactacgcagactccgtgaagggccggttcaccatctcccgcgacaattccaagaacacgctgtatctgcaaatgaacagcctgcgtgccgaggacaccgcggtatattactgtgcgaaaagtgaggggcgttttgactactggggtcagggaaccctggtcaccgtctcgagc

SEQ ID NO: 104 - DNA, 348 bp, Homo sapiens
gaggtgcagctgttggagtctgggggaggcttggtacagcctggggggtccctgcgtctctcctgtgcagcctccggattcacctttcgtaattatgggatggcgtgggtccgccaggctccagggaagggtctagagtgggtctcatggattgatgcgtctggtactgagacatactacgcagactccgtgaagggccggttcaccatctcccgcgacaattccaagaacacgctgtatctgcaaatgaacagcctgcgtgccgaggacaccgcggtatattactgtgcgaaaagtcatgggcgttttgactactggggtcagggaaccctggtcaccgtctcgagc

SEQ ID NO: 105 - DNA, 348 bp, Homo sapiens
gaggtgcagctgttggagtctgggggaggcttggtacagcctggggggtccctgcgtctctcctgtgcagcctccggattcacctttcgtaattatgggatggcgtgggtccgccaggctccagggaagggtctagagtgggtctcatggattgatgcgtctggtactgagacatactacgcagactccgtgaagggccggttcaccatctcccgcgacaattccaagaacacgctgtatctgcaaatgaacagcctgcgtgccgaggacaccgcggtatattactgtgcgaaaagttctgggcgttttgactactggggtcagggaaccctggtcaccgtctcgagc

SEQ ID NO: 106 - DNA, 348 bp, Homo sapiens
gaggtgcagctgttggagtctgggggaggcttggtacagcctggggggtccctgcgtctctcctgtgcagcctccggattcacctttcgtaattatgggatggcgtgggtccgccaggctccagggaagggtctagagtgggtctcatggattgatgcgtctggtactgagacatactacgcagactccgtgaagggccggttcaccatctcccgcgacaattccaagaacacgctgtatctgcaaatgaacagcctgcgtgccgaggataccgcggtatattactgtgcgaaaagtgctgggcgttttgactactggggtcagggaaccctggtcaccgtctcgagc

SEQ ID NO: 107 - DNA, 348 bp, Homo sapiens
gaggtgcagctgttggagtctgggggaggcttggtacagcctggggggtccctgcgtctctcctgtgcagcctccggattcacctttcgtaattatgggatggcgtgggtccgccaggctccagggaagggtctagagtgggtctcatggattgatgcgtctggtactgagacatactacgcagactccgtgaagggccggttcaccatctcccgcgacaattccaagaacacgctgtatctgcaaatgaacagcctgcgtgccgaggacaccgcggtatattactgtgcgaaaagtaatgggcgttttgactactggggtcagggaaccctggtcaccgtctcgagc

SEQ ID NO: 108 - DNA, 348 bp, Homo sapiens
gaggtgcagctgttggagtctgggggaggcttggtacagcctggggggtccctgcgtctctcctgtgcagcctccggattcacctttcgtaattatgggatggcgtgggtccgccaggctccagggaagggtctagagtgggtctcatggattgatgcgtctggtactgagacatactacgcagactccgtgaagggccggttcaccatctcccgcgacaattccaagaacacgctgtatctgcaaatgaacagcctgcgtgccgaggataccgcggtatattactgtgcgaaaagtctgcctcgttttgactactggggtcagggaaccctggtcaccgtctcgagc

SEQ ID NO: 109 - DNA, 348 bp, Homo sapiens
gaggtgcagctgttggagtctgggggaggcttggtacagcctggggggtccctgcgtctctcctgtgcagcctccggattcacctttcgtaattatgggatggcgtgggtccgccaggctccagggaagggtctagagtgggtctcatggattgatgcgtctggtactgagacatactacgcagactccgtgaagggccggttcaccatctcccgcgacaattccaagaacacgctgtatctgcaaatgaacagcctgcgtgccgaggacaccgcggtatattactgtgcgaaaagtctggggcgttgggactactggggtcagggaaccctggtcaccgtctcgagc

SEQ ID NO: 110 - DNA, 348 bp, Homo sapiens
gaggtgcagctgttggagtctgggggaggcttggtacagcctggggggtccctgcgtctctcctgtgcagcctccggattcacctttcgtaattatgggatggcgtgggtccgccaggctccagggaagggtctagagtgggtctcatggattgatgcgtctggtactgagacatactacgcagactccgtgaagggccggttcaccatctcccgcgacaattccaagaacacgctgtatctgcaaatgaacagcctgcgtgctgaggacaccgcggtatattactgtgcgaaaagtctggggcgtttggactactggggtcagggaaccctggtcaccgtctcgagc

SEQ ID NO: 111 - DNA, 348 bp, Homo sapiens
gaggtgcagctgttggagtctgggggaggcttggtacagcctggggggtccctgcgtctctcctgtgcagcctccggattcacctttcgtaattatgggatggcgtgggtccgccaggctccagggaagggtctagagtgggtctcatggattgatgcgtctggtactgagacatactacgcagactccgtgaagggccggttcaccatctcccgcgacaattccaagaacacgctgtatctgcaaatgaacagcctgcgtgccgaggacaccgcggtatattactgtgcgaaaagtctggggcgttttccgtactggggtcagggaaccctggtcaccgtctcgagc

SEQ ID NO: 112 - DNA, 348 bp, Homo sapiens
gaggtgcagctgttggagtctgggggaggcttggtacagcctggggggtccctgcgtctctcctgtgcagcctccggattcacctttcgtaattatgggatggcgtgggtccgccaggctccagggaagggtctagagtgggtctcatggattgatgcgtctggtactgagacatactacgcagactccgtgaagggccggttcaccatctcccgcgacaattccaagaacacgctgtatctgcaaatgaacagcctgcgtgccgaggataccgcggtatattactgtgcgaaaagtctggggcgttttgacgtgtggggtcagggaaccctggtcaccgtctcgagc

SEQ ID NO: 113 - DNA, 348 bp, Homo sapiens
gaggtgcagctgttggagtctgggggaggcttggtacagcctggggggtccctgcgtctctcctgtgcagcctccggattcacctttcgtaattatgggatggcgtgggtccgccaggctccagggaagggtctagagtgggtctcatggattgatgcgtctggtactgagacatactacgcagactccgtgaagggccggttcaccatctcccgcgacaattccaagaacacgctgtatctgcaaatgaacagcctgcgtgccgaggacaccgcggtatattactgtgcgaaaagtctgggggggtttgactactggggtcagggaaccctggtcaccgtctcgagc

SEQ ID NO: 114 - DNA, 348 bp, Homo sapiens; identical to SEQ ID NO: 40

SEQ ID NO: 115 - DNA, 348 bp, Homo sapiens
gaggtgcagctgttggagtctgggggaggcttggtacagcctggggggtccctgcgtctctcctgtgcagcctccggattcacctttcgtaattatgggatggcgtgggtccgccaggctccagggaagggtctagagtgggtctcatggattgatgcgtctggtactgagacatactacgcagaccccgtgaagggccggttcaccatctcccgcgacaattccaagaacacgctgtatctgcaaatgaacagcctgcgtgccgaggacaccgcggtatattactgtgcgaaaagtctggggcgttttgactactggggtcagggaaccctggtcaccgtctcgagc

SEQ ID NO: 116 - DNA, 348 bp, Homo sapiens
gaggtgcagctgttggagtctgggggaggcttggtacagcctggggggtccctgcgtctctcctgtgcagcctccggattcacctttcgtaattatgggatggcgtgggtccgccaggctccaggaaagggtctagagtgggtctcatggattgatgcgtctggtactgagacatactacgcagacccggtgaagggccggttcaccttgtcccgcgacaattccaagaacacgctgtatctgcaaatgaacagcctgcgtgccgaggacaccgcggtatattactgtgcgaaaagtctggggcgttttgactactggggtcagggaaccctggtcaccgtctcgagc

SEQ ID NO: 117 - DNA, 348 bp, Homo sapiens
gaggtgcagctgttggactctgggggaggcttggtacagcctggggggtccctgcgtctctcctgtgcagcctccggattcacctttcgtaattatgggatggcgtgggtccgccaggctccagggaagggtctagagtgggtctcatggattgatgcgtctggtactgagacatactacgcagacccggtgaagggccggttcaccttgtcccgcgacaattccaagaacacgctgtatctgcaaatgaacagcctgcgtgccgaggacaccgcggtatattactgtgcgaaaagtctggggcgttttgactactggggtcagggaaccctggtcaccgtctcgagc

SEQ ID NO: 118 - DNA, 348 bp, Homo sapiens
gaggtgcagctgttggactctgggggaggcttggtacagcctggggggtccctgcgtctctcctgtgcagcctccggattcacctttcgtaattatgggatggcgtgggtccgccaggctccagggaagggtctagagtgggtctcatggattgatgcgtctggtactgagacatactacgcagaccccgtgaagggccggttcaccatctcccgcgacaattccaagaacacgctgtatctgcaaatgaacagcctgcgtgccgaggacaccgcggtatattactgtgcgaaaagtctggggcgttttgactactggggtcagggaaccctggtcaccgtctcgagc

SEQ ID NO: 119 - DNA, 348 bp, Homo sapiens
gaggtgcaactgttggagtctgggggaggcttggtacagcctggggggtccctgcgtctctcctgtgcagcctccggattcacctttctccaccacgggatggcgtgggtccgccaggctccagggaagggtctagagtgggtctcatggattgatgcgtctggtactgagacatactacgcagactccgtgaggggccggttcaccatctcccgcgacaattccaagaacacgctgtatctgcaaatgaacagcctgcgtgccgaggacaccgcggtatattactgtgcgaaaagtctggggcgttttgactactggggtcagggaaccctggtcaccgtctcgagc

SEQ ID NO: 120 - DNA, 348 bp, Homo sapiens
gaggtgcagctgttggagtctgggggaggcttggtacagcctggggggtccctgcgtctctcctgtgcagcctccggattcacctttcgtaatcacggcatgggctgggtccgccaggctccagggaagggtctagagtgggtctcatggattgatgcgtctggtactgagacatactacgcagactccgtgaagggccggttcaccatctcccgcgacaattccaagaacacgctgtatctgcaaatgaacagcctgcgtgccgaggacgccgcggtatattactgtgcgaaaagtctggggcgttttgactactggggtcagggaaccctggtcaccgtctcgagc

SEQ ID NO: 121 - DNA, 348 bp, Homo sapiens
gaggtgcagctgttggagtctgggggaggcttggtacagcctggggggtccctgcgtctctcctgtgcagcctccggattcacctttcgtaatttcgggatggggtgggtccgccaggctccagggaagggtctagagtgggtctcatggattgatgcgtctggtactgagacatactacgcagactccgtgaagggccggctcaccatctcccgcgacaattccaagaacacgctgtatctgcaaatgaacagcctgcgtgccgaggacaccgcggtatattactgtgcgaaaagtctggggcgttttgactactggggtcagggaaccctggtcaccgtctcgagc

SEQ ID NO: 122 - DNA, 348 bp, Homo sapiens
gaggtgcagctgttggagtctgggggaggcttggtacagcctggggggtccctgcgtctctcctgtgcagcctccggattcacctttcgtaattatgggatggcgtgggtccgccaggctccagggaagggtctagagtgggtctcatggattctggggtctggtactgagacatactacgcagactccgtgaagggccggttcaccatctcccgcgacaattccaggaacacgctgtatctgcaaatgaacagcctgcgtgccgaggacaccgcggtatattactgtgcgaaaagtctggggcgttttgactactggggtcagggaaccctggtcaccgtctcgagc

SEQ ID NO: 123 - DNA, 348 bp, Homo sapiens
gaggtgcagctgttggagtctgggggaggcttggtacagcctggggggtccctgcgtctctcctgtgcagcctccggattcacctttcgtaattatgggatggcgtgggtccgccaggctccagggaagggtctagagtgggtctcatggattatctcctctggtactgagacatactacgcagactccgtgaagggccggttcaccatctcccgcgacaattccaagaacacgctgtatctgcaaatgaacagcctgcgtgccgaggacaccgcggtatattactgtgcgaaaagtctggggcgttttgactactggggtcagggaaccctggtcaccgtctcgagc

SEQ ID NO: 124 - DNA, 348 bp, Homo sapiens
gaggtgcagctgttggagtctgggggaggcttggtacagcctggggggtccctgcgtctctcctgtgcagcctccggattcacctttcgtaattatgggatggcgtgggtccgccaggctccagggaagggtctagagtgggtctcatggattttgtcctctggtactgagacatactacgcagactccgtgaagggccggttcaccatctcccgcgacaattccaagaacacgctgtatctgcaaatgaacagcctgcgtgccgaggacaccgcggtatattactgtgcgaaaagtctggggcgttttgactactggggtcagggaaccctggtcaccgtctcgagc

SEQ ID NO: 125 - DNA, 348 bp, Homo sapiens
gaggtgcagctgttggagtctgggggaggcttggtacagcctggggggtccctgcgtctctcctgtgcagcctccggattcacctttcgtaattatgggatggcgtgggtccgccaggctccagggaagggtctagagtgggtctcattcattctgccgtctggtactgagacatactacgcagactccgtgaagggccggttcaccatctcccgcgacaattccaagaacacgctgtatctgcaaatgaacagcctgcgtgccgaggacaccgcggtatattactgtgcgaaaagtctggggcgttttgactactggggtcagggaaccctggtcaccgtctcgagc

SEQ ID NO: 126 - DNA, 348 bp, Homo sapiens
gaggtgcagctgttggagtctgggggaggcttggtacagcctggggggtccctgcgtctctcctgtgcagcctccggattcacctttcgtaattatgggatggcgtgggtccgccaggctccagggaagggtctagagtgggtctcatggattcgggggtctggtactgagacatactacgcagactccgtgaagggccggttcaccatctcccgcgacaattccaggaacacgctgtatctgcaaatgaacagcctgcgtgccgaggacaccgcggtatattactgtgcgaaaagtctggggcgttttgactactggggtcagggaaccctggtcaccgtctcgagc

SEQ ID NO: 127 - DNA, 348 bp, Homo sapiens
gaggtgcagctgttggagtctgggggaggcttggtacagcctggggggtccctgcgtctctcctgtgcagcctccggattcacctttcgtaattatgggatggcgtgggtccgccaggctccagggaagggtctagagtgggtctcatggattcgcgggtctggtactgagacatactacgcagactccgtgaagggccggttcaccatctcccgcgacaattccaagaacacgctgtatctgcaaatgaacagcctgcgtgccgaggacaccgcggtatattactgtgcgaaaagtctggggcgttttgactactggggtcagggaaccctggtcaccgtctcgagc

SEQ ID NO: 128 - DNA, 348 bp, Homo sapiens
gaggtgcagctgttggagtctgggggaggcttggtacagcctggggggtccctgcgtctctcctgtgcagcctccggattcacctttcgtaattatgggatggcgtgggtccgccaggctccagggaagggtctggagtgggtctcatggattgatgcgaagggtaaggagacatactacgcagactccgtgaagggccggttcaccatctcccgcgacaattccaagaacacgctgtatctgcaaatgaacagcctgcgtgccgaggacaccgcggtatattactgtgcgaaaagtctggggcgttttgactactggggtcagggaaccctggtcaccgtctcgagc

SEQ ID NO: 129 - DNA, 348 bp, Homo sapiens
gaggtgcagctgttggagtctgggggaggcttggtacagcctggggggtccctgcgtctctcctgtgcagcctccggattcacctttcgtaattatgggatggcgtgggtccgccaggctccagggaagggtctagagtgggtctcatggattgatgcgaagggtagggagacatactacgcagactccgtgaagggccggttcaccatctcccgcgacaattccaagaacacgctgtatctgcaaatgaacagcctgcgtgccgaggacaccgcggtatattactgtgcgaaaagtctggggcgttttgactactggggtcagggaaccctggtcaccgtctcgagc

SEQ ID NO: 130 - DNA, 348 bp, Homo sapiens
gaggtgcagctgttggagtctgggggaggcttggtacagcctggggggtccctgcgtctctcctgtgcagcctccggattcacctttcgtaattatgggatggcgtgggtccgccaggctccagggaagggtctagagtgggtctcatggattgtgggggggggtactgagacatactacgcagactccgtgaagggccggttcaccatctcccgcgacaattccaagaacacgctgtatctgcaaatgaacagcctgcgtgccgaggacaccgcggtatattactgtgcgaaaagtctggggcgttttgactactggggtcagggaaccctggtcaccgtctcgagc

SEQ ID NO: 131 - DNA, 348 bp, Homo sapiens
gaggtgcagctgttggagtctgggggaggcttggtacagcctggagggtccctgcgtctctcctgtgcagcctccggattcacctttcgtaattatgggatggcgtgggtccgccaggctccagggaagggtctagagtgggtctcatggattgagggggggggtactgagacatactacgcagactccgtgaagggccggttcaccatctcccgcgacaattccaagaacacgctgtatctgcaaatgaacagcctgcgtgccgaggacaccgcggtatattactgtgcgaaaagtctggggcgttttgactactggggtcagggaaccctggtcaccgtctcgagc

SEQ ID NO: 132 - DNA, 348 bp, Homo sapiens
gaggtgcagctgttggagtctgggggaggcttggtacagcctggggggtccctgcgtctctcctgtgcagcctccggattcacctttcgtaattatgggatggcgtgggtccgccaggctccagggaagggtctggagtgggtctcatggattgtggggcagggtactgagacatactacgcagactccgtgaagggccggttcaccatctcccgcgacaattccaagaacacgctgtatctgcaaatgaacagcctgcgtgccgaggacaccgcggtatattactgtgcgaaaagtctggggcgttttgactactggggtcagggaaccctggtcaccgtctcgagc

SEQ ID NO: 133 - DNA, 348 bp, Homo sapiens
gaggtgcagctgttggagtctgggggaggcttggtacagcctggggggtccctgcgtctctcctgtgcagcctccggattcacctttcgtaattatgggatggcgtgggtccgccaggctccagggaagggtctagagtgggtctcatggattgtggggtcgggtactgagacatactacgcagactccgtgaagggccggttcaccatctcccgcgacaattccaagaacacgctgtatctgcaaatgaacagcctgcgtgccgaggacaccgcggtatattactgtgcgaaaagtctggggcgttttgactactggggtcagggaaccctggtcaccgtctcgagc

SEQ ID NO: 134 - DNA, 348 bp, Homo sapiens
gaggtgcagctgttggagtctgggggaggcttggtacagcctggggggtccctgcgtctctcctgtgcagcctccggattcacctttcgtaattatgggatggcgtgggtccgccaggctccagggaagggtctagagtgggtctcatggattcacaacaccggtactgagacatactacgcagactccgtgaagggccggttcaccatctcccgcgacaattccaagaacacgctgtatctgcaaatgaacagcctgcgtgccgaggacaccgcggtatattactgtgcgaaaagtctggggcgttttgactactggggtcagggaaccctggtcaccgtctcgagc

SEQ ID NO: 135 - DNA, 348 bp, Homo sapiens
gaggtgcagctgttggagtctgggggaggcttggtacagcctggggggtccctgcgtctctcctgtgcagcctccggattcacctttcacccccacgggatggcgtgggtccgccaggctccagggaagggtctagagtgggtctcatggattgatgcgtctggtactgagacatactacgcagactccgtgaagggccggttcaccatctcccgcgacaattccaagaacacgctgtatctgcaaatgaacagcctgcgtgccgaggacaccgcggtatattactgtgcgaaaagtctggggcgttttgactactggggtcagggaaccctggccaccgtctcgagc

SEQ ID NO: 136 - DNA, 348 bp, Homo sapiens
gaggtgcagctgttggagtctgggggaggcttggtacagcctggggggtccctgcgtctcccctgtgcagcctccggattcacctttcgtaatttcgggatggggtgggtccgccaggctccagggaagggtctagagtgggtctcatggattgatgcgtctggtactgagacatactacgcagactccgtgaagggccggttcaccatctcccgcgacaattccaagaacacgctgtatctgcaaatgaacagcctgcgtgccgaggacaccgcggtatattactgtgcgaaaagtctggggcgttttgactactggggtcagggaaccctggtcaccgtctcgagc

SEQ ID NO: 137 - DNA, 348 bp, Homo sapiens
gaggtgcagctgttggagtctgggggaggcttggtacagcctggggggtccctgcgtctctcctgtgcagcctccggattcacctttcgtaatttcgggatggggtgggtccgccaggctccagggaagggtctagagtgggtctcatggattgatgcgtctggtactgagacatactacgcagactccgtgaagggccggttcaccatctcccgcgacaattccaagaacacgctgtatctgcaaatgaacagcctgcgtgccgaggacaccgcggtatattactgtgcgaaaagtctggggcgttttgactactggggtcagggaaccctggtcaccgtctcgagc

SEQ ID NO: 138 - DNA, 348 bp, Homo sapiens
gaggtgcagctgttggagtctgggggaggcttggtacagcctggggggtccctgcgtctctcctgtgcagcctccggattcacctttcgtaattatgggatggcgtgggtccgccaggctccagggaagggtctagagtgggtctcattcattcactcctctggtactgagacatactacgcagactccgtgaagggccggttcaccatctcccgcgacaattccaagaacacgctgtatctgcaaatgaacagcctgcgtgccgaggacaccgcggtatattactgtgcgaaaagtctggggcgttttgactactggggtcagggaaccctggtcaccgtctcgagc

SEQ ID NO: 139 - DNA, 348 bp, Homo sapiens
gaggtgcagctgttggagtctgggggaggcttggtacagcctggggggtccctgcgtctctcctgtgcagcctccggattcacctttcgtaattatgggatggcgtgggtccgccaggctccagggaagggtctagagtgggtctcatggattgagagctctggtactgagacatactacgcagactccgtgaagggccggttcaccatctcccgcgacaattccaagaacacgctgtatctgcaaatgaacagcctgcgtgccgaggacaccgcggtatattactgtgcgaaaagtctggggcgttttgactactggggtcagggaaccctggtcaccgtctcgagc

SEQ ID NO: 140 - DNA, 348 bp, Homo sapiens
gaggtgcagctgttggagtctgggggaggcttggtacagcctggggggtccctgcgtctctcctgtgcagcctccggattcacctttcgtaattatgggatggcgtgggtccgccaggctccagggaagggtctagagtgggtctcatggattctgaactctggtactgagacatactacgcagactccgtgaagggccggttcaccatctcccgcgacaattccaagaacacgctgtatctgcaaatgaacagcctgcgtgccgaggacaccgcggtatattactgtgcgaaaagtctggggcgttttgactactggggtcagggaaccctggtcaccgtctcgagc

SEQ ID NO: 141 - DNA, 348 bp, Homo sapiens
gaggtgcagctgttggagtctgggggaggcttggtacagcctggggggtccctgcgtctctcctgtgcagcctccggattcacctttcgtaattatgggatggcgtgggtccgccaggctccagggaagggtctagagtgggtctcatggattcagaactctggtactgagacatactacgcagactccgtgaagggccggttcaccatctcccgcgacaattccaagaacacgctgtatctgcaaatgaacagcctgcgtgccgaggacaccgcggtatattactgtgcgaaaagtctggggcgttttgactactggggtcagggaaccctggtcaccgtctcgagc

SEQ ID NO: 142 - DNA, 348 bp, Homo sapiens
gaggtgcagctgttggagtctgggggaggcttggtacagcctggggggtccctgcgtctctcctgtgcagccaccggattcacctttcgtaattatgggatggcgtgggtccgccaggctccagggaagggtctagagtgggtctcatggattgtggggtctggtactgagacatactacgcagactccgtgaagggccggttcaccatctcccgcgacaattccaagaacacgctgtatctgcaaatgaacagcctgcgtgccgaggacaccgcggtatattactgtgcgaaaagtctggggcgttttgactactggggtcagggaaccctggtcaccgtctcgagc

SEQ ID NO: 143 - DNA, 348 bp, Homo sapiens
gaggtgcagctgttggagtctgggggaggcttggtacagcctggggggtccctgcgtctctcctgtgcagcctccggattcacctttcgtaattatgggatggcgtgggtccgccaggctccagggaagggtctagagtgggtctcattcattttgtcctctggtactgagacatactacgcagactccgtgaagggccggttcaccatctcccgcgacaattccaagaacacgctgtatctgcaaatgaacagcctgcgtgccgaggacaccgcggtatattactgtgcgaaaagtctggggcgttttgactactggggtcagggaaccctggtcaccgtctcgagc

SEQ ID NO: 144 - DNA, 348 bp, Homo sapiens
gaggtgcagctgttggagtctgggggaggcttggtacagcctggggggtccctgcgtctcttctgtgcagcctccggattcacctttcgtaattatgggatggcgtgggtccgccaggctccagggaagggtctagagtgggtctcatggattgatgcgaagggtagggagacatactacgcagactccgtgaagggccggttcaccatctcccgcgacaattccaagaacacgctgtatctgcaaatgaacagcctgcgtgccgaggacaccgcggtatattactgtgcgaaaagtctggggcgttttgactactggggtcagggaaccctggtcaccgtctcgagc

SEQ ID NO: 145 - DNA, 348 bp, Homo sapiens
gaggtgcagctgttggagtctgggggaggcttggtacagcctggggggtccctgcgtctctcctgtgcagcctccggattcacctttcgtaattatgggatggcgtgggtccgccaggctccagggaagggtctagagtgggtctcatggattgatgcgaagggtaaggagacatactacgcagactccgtgaagggccggttcaccatctcccgcgacaattccaagaacacgctgtatctgcaaatgaacagcctgcgtgccgaggacaccgcggtatattactgtgcgaaaagtctggggcgttttgactactggggtcagggaaccctggtcaccgcctcgagc

SEQ ID NO: 146 - DNA, 348 bp, Homo sapiens
gaggtgcagctgttggagtctgggggaggcttggtacagcctggggggtccctgcgtctctcctgtgcagcctccggattcacctttcgtaattatgggatggcgtgggtccgccaggctccagggaagggtctagagtgggtctcatggattgaggggcggggtactgagacatactacgcagactccgtgaagggccggttcaccatctcccgcgacaattccaagaacacgctgtatctgcaaatgaacagcctgcgtgccgaggacaccgcggtatattactgtgcgaaaagtctggggcgttttgactactggggtcagggaaccctggtcaccgtctcgagc

SEQ ID NO: 147 - DNA, 348 bp, Homo sapiens
gaggtgcagctgttggagtctgggggaggcttggtacagcctggggggtccctgcgtctctcctgtgcagcctccggattcacctttcgtaattatgggatggcgtgggtccgccaggctccagggaagggtctagagtgggtctcatggattgatgcgtctggtactgagacatactacgcagactccgtgaagggccggttcaccatctcccgcggcaattccaagaacacgctgtatctgcaaatgaacagcctgcgtgccgaggacaccgcggtatattactgtgcgaaaagtctggggcgttttgactactggggtcagggaaccctggtcaccgtctcgagc

SEQ ID NO: 148 - DNA, 348 bp, Homo sapiens
gaggtgcagctgttggagtctgggggaggcttggtacagcctggggggtccctgcgtctctcctgtgcagcctccggattcacctttcgtaattatgggatggcgtgggtccgccaggctccagggaagggtctagagtgggtctcatggattgtgggggggggtactgagacatactacgcagactccgtgaagggccggttcgccatctcccgcgacaattccaagaacacgctgtatctgcaaatgaacagcctgcgtgccgaggacaccgcggtatattactgtgcgaaaagtctggggcgttttgactactggggtcagggaaccctggtcaccgtctcgagc

SEQ ID NO: 149 - DNA, 348 bp, Homo sapiens
gaggtgcagctgttggagtctgggggaggcttggtacagcctggggggtccccgcgtctctcctgtgcagcctccggattcacctttaaggagaacgggatggcgtgggtccgccaggcttcagggaagggtctagagtgggtctcatggattgatgcgtctggtactgagacatactacgcagactccgtgaagggccggttcaccatctcccgcgacaattccaagaacacgctgtatctgcaaatgaacagcctgcgtgccgaggacaccgcggtatattactgtgcgaaaagtctggggcgttttgactactggggtcagggaaccctggtcaccgtctcgagc

SEQ ID NO: 150 - DNA, 348 bp, Homo sapiens
gaggtgcagctgttggagtctgggggaggcttggtacagcctggggggtccctgcgtctctcctgtgcagcctccggattcacctttcgtaattacgggatggggtgggtccgccaggctccagggaagggtctagagtgggtctcatggattgatgcgtctggtactgagacatactacgcagactccgtgaagggccggttcaccatctcccgcgacaattccaagaacacgctgtatctgcaaatgaacagcctgcgtgccgaggacgccgcggtatattactgtgcgaaaagtctggggcgttttgactactggggtcagggaaccctggtcaccgtctcgagc

SEQ ID NO: 151 - DNA, 348 bp, Homo sapiens
gaggtgcagctgttggagtctgggggaggcttggtacagcctggggggtccctgcgtctctcctgtgcagcctccggattcacctttcgtaatttcgggatggggtgggtccgccaggctccagggaagggtctagagtgggtctcatggattgatgcgtctggtactgagacatactacgcagactccgtgaagggccggttcaccatctcccgcgacaattccaagaacacgctgtatctgcaaatgaacagcctgcgtgccgaggacgccgcggtatattactgtgcgaaaagtctggggcgttttgactactggggtcagggaaccctggtcaccgtctcgagc

SEQ ID NO: 152 - DNA, 348 bp, Homo sapiens
gaggtgcagctgttggagtctgggggaggcttggtacagcctggggggtccctgcgtctctcctgtgcagcctccggattcacctttcgtaattatgggatggcgtgggtccgccaggctccagggaagggtctagagtgggtctcattcattctcccctctggtactgagacatactacgcagactccgtgaagggccggttcaccatctcccgcgacaattccaagaacacgctgtatctgcaaatgaacagcctgcgtgccgaggacgccgcggtatattactgtgcgaaaagtctggggcgttttgactactggggtcagggaaccctggtcaccgtctcgagc

SEQ ID NO: 153 - DNA, 348 bp, Homo sapiens
gaggtgcagctgttggagtctgggggaggcttggtacagcctggggggtccctgcgtctctcctgtgcagcctccggattcacctttcgtaattatgggatggcgtgggtccgccaggctccagggaagggtctagagtgggtctcattcattgtcggctctggtactgagacatactacgcagactccgtgaagggccggttcaccatctcccgcgacaattccaagaacacgctgtatctgcaaatgaacagcctgcgtgccgaggacaccgcggtatattactgtgcgaaaagtctggggcgttttgactactggggtcagggaaccctggtcaccgtctcgagc

SEQ ID NO: 154 - DNA, 348 bp, Homo sapiens
gaggtgcagctgttggagtctgggggaggcttggtacagcctggggggtccctgcgtctctcctgtgcagcctccggattcacctttcgtaattatgggatggcgtgggtccgccaggctccagggaagggtctagagtgggtctcatggattacgtggtctggtactgagacatactacgcagactccgtgaagggccggttcaccatctcccgcgacaattccaagaacacgctgtatctgcaaatgaacagcctgcgtgccgaggacaccgcggtatattactgtgcgaaaagtctggggcgttttgactactggggtcagggaaccctggtcaccgtctcgagc

SEQ ID NO: 155 - DNA, 348 bp, Homo sapiens
gaggtgcagctgttggagtctgggggaggcttggtacagcctggggggtccctgcgtctctcctgtgcagcctccggattcacctttcgtaattatgggatggcgtgggtccgccaggctccagggaagggtctagagtgggtctcattcattgtgtcctctggtactgagacatactacgcagactccgtgaagggccggttcaccatctcccgcgacaattccaagaacacgctgtatctgcaaatgaacagcctgcgtgccgaggacaccgcggtatattactgtgcgaaaagtctggggcgttttgactactggggtcagggaaccctggtcaccgtctcgagc

SEQ ID NO: 156 - DNA, 348 bp, Homo sapiens
gaggtgcagctgttggagtctgggggaggcttggtacagcctggggggtccctgcgtctctcctgtgcagcctccggattcacctttcgtaattatgggatggcgtgggtccgccaggctccagggaagggtctagagtgggtctcatggattacgaactctggtactgagacatactacgcagactccgtgaagggccggttcaccatctcccgcgacaattccaagaacacgctgtatctgcaaatgaacagcctgcgtgccgaggacaccgcggtatattactgtgcgaaaagtctggggcgttttgactactggggtcagggaaccctggtcgccgtctcgagc

SEQ ID NO: 157 - DNA, 348 bp, Homo sapiens
gaggtgcagctgttggagtctgggggaggcttggtacagcctggggggtccctgcgtctctcctgtgcagcctccggattcacctttcgtaattatgggatggcgtgggtccgccaggctccagggaagggtctggagtgggtctcatggattttggcgtctggtactgagacatactacgcagactccgtgaagggccggttcaccatctcccgcgacaattccaagaacacgctgtatctgcaaatgaacagcctgcgtgccgaggacaccgcggtatattactgtgcgaaaagtctggggcgttttgactactggggtcagggaaccctggtcaccgtctcgagc

SEQ ID NO: 158 - DNA, 348 bp, Homo sapiens
gaggtgcagctgttggagtctgggggaggcttggtacagcctggggggtccctgcgtctcttctgtgcagcctccggattcacctttcgtaattatgggatggcgtgggtccgccaggctccagggaagggtctagagtgggtctcatggattgatgcgaagggtaacgagacatactacgcagactccgtgaagggccggttcaccatctcccgcgacaattccaagaacacgctgtatctgcaaatgaacagcctgcgtgccgaggacaccgcggtatattactgtgcgaaaagtctggggcgttttgactactggggtcagggaaccctggtcaccgtctcgagc

SEQ ID NO: 159 - DNA, 348 bp, Homo sapiens
gaggtgcagctgttggagtctgggggaggcttggtacagcctggggggtccctgcgtctctcctgtgcagcctccggattcacctttcgtaattatgggatggcgtgggtccgccaggctccagggaagggtctagagtgggtctcatggattgatgcgaagggtaaggagacatactacgcagactccgtgaagggccggttcaccatctcccgcgacaattccaagaacacgctgtatctgcaaatgaacagcctgcgtgccgaggacaccgcggtatattactgtgcgaaaagtctggggcgttttgactactggggtcagggagccctggtcaccgtctcgagc

SEQ ID NO: 160 - DNA, 348 bp, Homo sapiens
gaggtgcagctgttggagtctgggggaggcttggtacagcctggggggtccctgcgtctctcctgtgcagcctccggattcacctttcgtaattatgggatggcgtgggtccgccaggctccagggaagggtctagagtgggtctcatggattgatgcgatgggtaaggagacatactacgcagactccgtgaagggccggttcaccatctcccgcgacaattccaagaacacgctgtatctgcaaatgaacagcctgcgtgccgaggacaccgcggtatattactgtgcgaaaagtctggggcgttttgactactggggtcagggaaccctggtcaccgtctcgagc

SEQ ID NO: 161 - DNA, 348 bp, Homo sapiens
gaggtgcagctgttggagtctgggggaggcttggtacagcctggggggtccctgcgtctctcctgtgcagcctccggattcacctttcgtaattatgggatggcgtgggtccgccaggctccagggaagggtctagagtgggtctcatggattgatgcgtctagtactgagacatactacgcagactccgtgaagggccggttcaccatctcccgcgacaattccaagaacacgctgtatctgcaaatgaacagcctgcgtgccgaggacaccgcggtatattactgtgcgaaaagtctggggcgttttgactactggggtcagggaaccctggtcaccgtctcgagc

SEQ ID NO: 162 - DNA, 348 bp, Homo sapiens
gaggtgcagctgttggagtctgggggaggcttggtacagcctggggggtccctgcgtctctcctgtgcagcctccggattcacctttcgtaatttcgggatggggtgggtccgccaggctccagggaagggtctagagtgggtctcatggattctggggtctggtactgagacatactacgcagactccgtgaagggccggttcaccatctcccgcgacaattccaggaacacgctgtatctgcaaatgaacagcctgcgtgccgaggacaccgcggtatattactgtgcgaaaagtctggggcgttttgactactggggtcagggaaccctggtcaccgtctcgagc

SEQ ID NO: 163 - DNA, 348 bp, Homo sapiens
gaggtgcagctgttggagtctgggggaggcttggtacagcctggggggtccctgcgtctctcctgtgcagcctccggattcacctttcgtaatttcgggatggggtgggtccgccaggctccagggaagggtctagagtgggtctcatggattgtggggtcgggtactgagacatactacgcagactccgtgaagggccggttcaccatctcccgcgacaattccaagaacacgctgtatctgcaaatgaacagcctgcgtgccgaggacaccgcggtatattactgtgcgaaaagtctggggcgttttgactactggggtcagggaaccctggtcaccgtctcgagc

SEQ ID NO: 164 - DNA, 348 bp, Homo sapiens
gaggtgcagctgttggagtctgggggaggcttggtacagcctggggggtccctgcgtctctcctgtgcagcctccggattcacctttcgtaatttcgggatggggtgggtccgccaggctccagggaagggtctagagtgggtctcatggattgagggggggggtactgagacatactacgcagactccgtgaagggccggttcaccatctcccgcgacaattccaagaacacgctgtatctgcaaatgaacagcctgcgtgccgaggacaccgcggtatattactgtgcgaaaagtctggggcgttttgactactggggtcagggaaccctggtcaccgtctcgagc

SEQ ID NO: 165 - DNA, 348 bp, Homo sapiens
gaggtgcagctgttggagtctgggggaggcttggtacagcctggggggtccctgcgtctctcctgtgcagcctccggattcacctttcgtaatttcgggatggggtgggtccgccaggctccagggaagggtctagagtgggtctcatggattatctcctctggtactgagacatactacgcagactccgtgaagggccggttcaccatctcccgcgacaattccaagaacacgctgtatctgcaaatgaacagcctgcgtgccgaggacaccgcggtatattactgtgcgaaaagtctggggcgttttgactactggggtcagggaaccctggtcaccgtctcgggc

SEQ ID NO: 166 - DNA, 348 bp, Homo sapiens
gaagtgcagctgctggaaagcggcggcggcctggtgcagccgggcggcagcctgcgtctgagctgcgcggcgagcggctttacctttggcgataccatgatgggctgggtgcgtcaggcgccgggcaaaggcctggaatgggtgagcgcgattatgcatgatggcgtgcatacctattatgcggatagcgtgaaaggccgttttaccattagccgtgataacagcaaaaacaccctgtatctgcagatgaacagcctgcgtgcggaagataccgcggtgtattattgcgcgaaaagcctgggccgttttgattattggggccagggcaccctggtgaccgtgagcagc

SEQ ID NO: 167 - DNA, 348 bp, Homo sapiens
gaagtgcagctgctggaaagcggcggcggcctggtgcagccgggcggcagcctgcgtctgagctgcgcggcgagcggctttacctttggcgaaaacggcatgggctgggtgcgtcaggcgccgggcaaaggcctggaatgggtgagctatattgaagatgatggcacccatacctattatgcggatagcgtgaaaggccgttttaccattagccgtgataacagcaaaaacaccctgtatctgcagatgaacagcctgcgtgcggaagataccgcggtgtattattgcgcgaaaagctatggcgcgtttgattattggggccagggcaccctggtgaccgtgagcagc

SEQ ID NO: 168 - DNA, 348 bp, Homo sapiens
gaagtgcagctgctggaaagcggcggcggcctggtgcagccgggcggcagcctgcgtctgagctgcgcggcgagcggctttacctttgaatttgcgggcatggcgtgggtgcgtcaggcgccgggcaaaggcctggaatgggtgagcagcattgattgggatggcggcatgacctattatgcggatagcgtgaaaggccgttttaccattagccgtgataacagcaaaaacaccctgtatctgcagatgaacagcctgcgtgcggaagataccgcggtgtattattgcgcgaaacatgaaatggattttgattattggggccagggcaccctggtgaccgtgagcagc

SEQ ID NO: 169 - DNA, 348 bp, Homo sapiens
  misc_feature 166, 167, 168: n = A,T,C or G
gaagtgcagctgctggaaagcggcggcggcctggtgcagccgggcggcagcctgcgtctgagctgcgcggcgagcggctttacctttccggcgaacggcatgggctgggtgcgtcaggcgccgggcaaaggcctggaatgggtgagctatattgatagcaacggcnnnctgacctattatgcggatagcgtgaaaggccgttttaccattagccgtgataacagcaaaaacaccctgtatctgcagatgaacagcctgcgtgcggaagataccgcggtgtattattgcgcgaaaagctatggcgcgtttgattattggggccagggcaccctggtgaccgtgagcagc

SEQ ID NO: 170 - DNA, 348 bp, Homo sapiens
gaagtgcagctgctggaaagcggcggcggcctggtgcagccgggcggcagcctgcgtctgagctgcgcggcgagcggctttacctttgatgaaaccggcatgggctgggtgcgtcaggcgccgggcaaaggcctggaatgggtgagctatattgaaagccatggcatgggcacctattatgcggatagcgtgaaaggccgttttaccattagccgtgataacagcaaaaacaccctgtatctgcagatgaacagcctgcgtgcggaagataccgcggtgtattattgcgcgaaaagctatggcgcgtttgattattggggccagggcaccctggtgaccgtgagcagc

SEQ ID NO: 171 - DNA, 348 bp, Homo sapiens
  misc_feature 154, 155, 156: n = A,T,C or G
gaagtgcagctgctggaaagcggcggcggcctggtgcagccgggcggcagcctgcgtctgagctgcgcggcgagcggctttaccttttttgatcatggcatgggctgggtgcgtcaggcgccgggcaaaggcctggaatgggtgagctatattnnnaccccgggcggcgaaacctattatgcggatagcgtgaaaggccgttttaccattagccgtgataacagcaaaaacaccctgtatctgcagatgaacagcctgcgtgcggaagataccgcggtgtattattgcgcgaaaagctatggcgcgtttgattattggggccagggcaccctggtgaccgtgagcagc

SEQ ID NO: 172 - DNA, 348 bp, Homo sapiens
  misc_feature 292, 293, 294: n = A,T,C or G
gaggtgcagctgttggagtctgggggaggcttggtacagcctggggggtccctgcgtctctcctgtgcagcctccggattcacctttagggatgagcctatggcgtgggtccgccaggctccagggaagggtctagagtgggtctcagatatttctgctgagggtgagactacatactacgcagactccgtgaagggccggttcaccatctcccgcgacaattccaagaacacgctgtatctgcaaatgaacagcctgcgtgccgaggacaccgcggtatattactgtgcgnnnactttgggtacttttgactactggggtcagggaaccctggtcaccgtctcgagc

SEQ ID NO: 173 - DNA, 348 bp, Homo sapiens
gaggtgcagctgttggagtctgggggaggcttggtacagcctggggggtccctgcgtctctcctgtgcagcctccggattcacctttggtgatcatgggatggggtgggtccgccaggctccagggaagggtctagagtgggtctcatatattgggtctacgggtggtcgtacatactacgcagactccgtgaagggccggttcaccatctcccgcgacaattccaagaacacgctgtatctgcaaatgaacagcctgcgtgccgaggacaccgcggtatattactgtgcgaaaagttatggtgcttttgactactggggtcagggaaccctggtcaccgtctcgagc

SEQ ID NO: 174 - DNA, 348 bp, Homo sapiens
gaggtgcagctgttggagtctgggggaggcttggtacagcctggggggtccctgcgtctctcctgtgcagcctccggattcacctttgatgatgagatgatgtcgtgggtccgccaggctccagggaagggtctagagtgggtctcagagattacggctggtggtgttattacatactacgcagactccgtgaagggccggttcaccatctcccgcgacaattccaagaacacgctgtatctgcaaatgaacagcctgcgtgccgaggacaccgcggtatattactgtgcgacaactggttcggattttgactactggggtcagggaaccctggtcaccgtctcgagc

SEQ ID NO: 175 - protein, 116 aa, Homo sapiens
EVQLLESGGGLVQPGGSLRLSCAASGFTFAKYRMAWVRQAPGKGLEWVSSINTLGTTTYYADSVKGRFTISRDNSKNTLYLQMNSLRAEDTAVYYCAKDDPPFDYWGQGTLVTVSS

SEQ ID NO: 176 - protein, 116 aa, Homo sapiens
EVQLLESGGGLVQPGGSLRLSCAASGFTFELYRMAWVRQAPGKGLEWVSQIEPDGGGTYYADSVKGRFTISRDNSKNTLYLQMNSLRAEDTAVYYCAKDEFPFDYWGQGTLVTVSS

SEQ ID NO: 177 - protein, 116 aa, Homo sapiens
EVQLLESGGGLVQPGGSLRLSCAASGFTFKNYAMGWVRQAPGKGLEWVSYIPDHGVDTYYADSVKGRFTISRDNSKNTLYLQMNSLRAEDTAVYYCAKSLGRFDYWGQGTLVTVSS

SEQ ID NO: 178 - protein, 116 aa, Homo sapiens
EVQLLESGGGLVQPGGSLRLSCAASGFTFRDYSMGWVRQAPGKGLEWVSFITQHGRDTYYADSVKGRFTISRDNSENTLYLQMNSLRAEDTAVYYCAKSLSRFDYWGQGTLVTVSS

SEQ ID NO: 179 - protein, 115 aa, Homo sapiens
EVQLLESGGGLVQPGGSLRLSCAASGFTFGRYMMVWVRQAPGKGLEWVSAISPPGDSTYYADSVKGRFTISRDNSKNTLYLQMNSLRAEDTAVYYCAKSLGRFDYWGQGTLVTVR

SEQ ID NO: 180 - protein, 116 aa, Homo sapiens
EVQLLESGGGLVQPGGSLRLSCAASGFTFGLYSMAWVRQAPGKGLEWVSFITSNGRSTYYADSVKGRFTISRDNSKNTLYLQMNSLRAEDTAVYYCAKTLGRFDYWGQGTLVTVSS

SEQ ID NO: 181 - protein, 116 aa, Homo sapiens
EVQLLESGGGLVQPGGSLRLSCAASGFTFGRYMMVWVRQAPGKGLEWVSAISPPGDSTYYADSVKGRFTISRDNSKNTLYLQMNSLRAEDTAVYYCAKSLGRFDYWGQGTLVTVSS

SEQ ID NO: 182 - protein, 116 aa, Homo sapiens
EVQLLESGGGLVQPGGSLRLSCAASGFTFEEYGMAWARQAPGKGLEWVSYIVADGARTYYADSVKGRFTISRDNSKNTLYLQMNSLRAEDTAVYYCAKSLGRFDYWGQGTLVTVSS

SEQ ID NO: 183 - protein, 116 aa, Homo sapiens
EVQLLESGGGLVQPGGSLRLSCAASGFTFMSYQMNWVRQAPGKGLEWVSAISPDGAFTYYADSVKGRFTISRDNSKNTLYLQMNSLRAEDTAVYYCAKSLGRFDYWGQGTLVTVSS

SEQ ID NO: 184 - protein, 116 aa, Homo sapiens
EVQLLESGGGLVQPGGSLRLSCAASGFTFLRYGMGWVRQAPGKGLEWVSWIEPSGHSTYYADSVKGRFTISRDNSKNTLYLQMNSLRAEDTAVYYCAKSYGAFDYWGQGTLVTVSS

SEQ ID NO: 185 - protein, 116 aa, Homo sapiens
EVQLLESGGGLVQPGGSLRLSCAASGFTFGRYDMCWVRQAPGKGLEWVSGIHFDGMETYYADSVKGRFTISRDNSKNTLYLQMNSLRAEDTAVYYCAKDQWPFDYWGQGTLVTVSS

SEQ ID NO: 186 - protein, 116 aa, Homo sapiens
EVQLLESGGGLVQPGGSLRLSCAASGFTFANYGMGWVRQAPGKGLEWVSYISPIGPRTYYADSVKGRFTISRDNSKNTLYLQMNSLRAEDTAVYYCAKSYGAFDYWGQGTLVTVSS

SEQ ID NO: 187 - protein, 116 aa, Homo sapiens
EVQLLESGGGLVQPGGSLRLSCAASGFTFRWYGMGWVRQAPGQGLEWVSYILPGGSETYYADSVKGRFTISRDNSKNTLYLQMNSLRAEDTAVYYCAKSYGAFDYWGQGTLVTVSS

SEQ ID NO: 188 - protein, 116 aa, Homo sapiens
EVQLLESGGGLVQPGGSLRLSCAASGFTFEAYGMGWVRQAPGKGLEWVSFITSSGLSTYYADSVKGRFTISRDNSKNTLYLQMNSLRAEDTAVYYCAKSLGRFDYWGQGTLVTVSS

SEQ ID NO: 189 - protein, 116 aa, Homo sapiens
EVQLLESGGGLVQPGGSLRLSCAASGFTFRDYSMGWVRQAPGKGLEWVSYIETEGRRTYYADSVKGRFTISRDNSKNTLYLQMNSLRAEDTAVYYCAKSLGRFDYWGQGTLVTVSS

SEQ ID NO: 190 - protein, 116 aa, Homo sapiens
EVQLLESGGGLVQPGGSLRLSCAASGFTFSEYSMAWVRQAPGKGLEWVSYIPHDGMRTYYADSVKGRFTISRDNSKNTLYLQMNSLRAEDTAVYYCAKSLSRFDYWGQGTLVTVSS

SEQ ID NO: 191 - protein, 116 aa, Homo sapiens
EVQLLESGGGLVQPGGSLRLSCAASGFTFKQYGMAWVRQAPGKGLEWVSWIDGVGLSTYYADSVKGRFTISRDNSKNTLYLQMNSLRAEDTAVYYCAKSLSRFDYWGQGTLVTVSS

SEQ ID NO: 192 - protein, 116 aa, Homo sapiens
EVQLLESGGGLVQPGGSLRLSCAASGFTFEEYGMGWVRQAPGKGLEWVSWIPEGGRRTYYADSVKGRFTISRDNSKNTLYLQMNSLRAEDTAVYYCAKNYSPFDYWGQGTLVTVSS

SEQ ID NO: 193 - protein, 116 aa, Homo sapiens
EVQLLESGGGLVQPGGSLRLSCAASGFTFAEYSMNWVRQAPGKGLEWVSHINAAGNRTYYADSVKGRFTISRDNSKNTLYLQMNSLRAEDTAVYYCAKSLGRFDYWGQGTLVTVSS

SEQ ID NO: 194 - protein, 116 aa, Homo sapiens
EVQLLESGGGLVQPGGSLRLSCAASGFTFTSYGMGWVRQAPGKGLEWVSYILAAGNATYYADSVKGRFTISRDNSKNTLYLQMNSLRAEDTAVYYCAKSYGAFDYWGQGTLVTVSS

SEQ ID NO: 195 - protein, 116 aa, Homo sapiens
EVQLLESGGGLVQPGGSLRLSCAASGFTFQSYAMGWVRQAPGKGLEWVSYISPTGHHTYYADSVKGRFTISRDNSKNTLYLQMNSLRAEDTAVYYCAKSLGRFDYWGQGTPVTVSS

SEQ ID NO: 196 - protein, 116 aa, Homo sapiens
EVQLLESGGGLVQPGGSLRLSCAASGFTFVSYPMGWVRQAPGKGLEWVSWIPGDGSATYYADSVKGRFTISRDNSKNTLYLQMNSLRAEDTAVYYCAKSLSRFDYWGQGTLVTVSS

SEQ ID NO: 197 - protein, 116 aa, Homo sapiens
EVQLLESGGGLVQPGGSLRLSCAASGFTFNHYGMGWVRQAPGKGLEWVSYITFPGLQTYYADSVKGRFTISRDNSKNTLYLQMNSLRAEDTAVYYCAKSYGAFDYWGQGTLVTVSS

SEQ ID NO: 198 - protein, 116 aa, Homo sapiens
EVQLLESGGGLVQPGGSLRLSCAASGFTFMYYGMGWVRQAPGKGLEWVSWITANGSSTYYADSVKGRFTISRDNSKNTLYLQMNSLRAEDTAVYYCAKSLGRFDYWGQGTLVTVSS

SEQ ID NO: 199 - protein, 116 aa, Homo sapiens
EVQLLESGGGLVQPGGSLRLSCAASGFTFRNYGMAWVRQAPGKGLEWVSWIDASGTETYYADSVKGRFTISRDNSKNTLYLQMNSLRAEDTAVYYCAKSLGRFDYWGQGTLVTVSS

SEQ ID NO: 200 - protein, 116 aa, Homo sapiens
EVQLLESGGGLVQPGGSLRLSCAASGFTFRNYGMAWVRQAPGKGLEWVSWIDASGTETYYADSVKGRFTISRDNSKNTLYLQMNSLRAEDTAVYYCAKSLGRFDYWGQGTPVTVSS

SEQ ID NO: 201 - protein, 116 aa, Homo sapiens
EVQLLESGGGLVQPGGSLRLSCAASGFTFRNYGMAWVRQAPGKGLEWVSWIDASGTETYYSSSVKGRFTISRDNSKNTLYLQMNSLRAEDTAVYYCAKSLGRFDYWGQGTLVTVSS

SEQ ID NO: 202 - protein, 116 aa, Homo sapiens
EVQLLESGGGLVQTGGSLRLSCAASGFTFRNYGMAWVRQAPGKGLEWVSWIDASGTETYYADSVKGRFTISRDNSKNTLYLQMNSLRAEDTAVYYCAKSLGRFDYWGQGTLVTVSS

SEQ ID NO: 203 - protein, 116 aa, Homo sapiens
EVQLLESGGGLVQPGGSLRLSCAASGFTFRNYGTAWVRQAPGKGLEWVSWIDASGTETYYADSVKGRFTISRDNSKNTLYLQMNSLRAEDTAVYYCAKSLGRFDYWGQGTLVTVSS

SEQ ID NO: 204 - protein, 116 aa, Homo sapiens
EVQLLESGGGLVQPGGSLRLSCAASGFTFRNYGMAWVRQAPGKGLEWVSWIDASGTETYYADPVKGRITISRDNSKNTLYLQMNSLRAEDTAVYYCAKSLGRFDYWGQGTLVTVSS

SEQ ID NO: 205 - protein, 116 aa, Homo sapiens
EVQLSESGGGLVQPGGSLRLSCAASGFTFRNYGMAWVRQAPGKGLEWVSWIDASGTETYYADSVKGRFTISRDNSKNTLYLQMNSLRAEDTAVYYCAKSLGRFDYWGQGTLVTVSS

SEQ ID NO: 206 - protein, 116 aa, Homo sapiens
EVQLLESGGGLVQPGGSLRLSCAVSGFTFRNYGMAWVRQAPGKGLEWVSWIDASGTETYYADSVKGRFTISRDNSKNTLYLQMNSLRAEDTAVYYCAKSLGRFDYWGQGTLVTVSS

SEQ ID NO: 207 - protein, 116 aa, Homo sapiens
EVQLLESGGGLVRPGGSLRLSCAASGFTFRNYGMAWVRQAPGKGLEWVSWIDASGTETYYADSVKGRFTISRDNSKNTLYLQMNSLRAEDTAVYYCAKSLGRFDYWGQGTLVTVSS

SEQ ID NO: 208 - protein, 116 aa, Homo sapiens
  VARIANT 30, 65: Xaa = Any Amino Acid
EVQLLESGGGLVQPGGSLRLSCAASGFTFXNYGMAWVRQAPGKGLEWVSWIYASGTETYYADSVXGRFTISRDNSKNTLYLQMNSLRAEDTAVYYCAKSLGRFDYWGQGNPGHLSS

SEQ ID NO: 209 - protein, 116 aa, Homo sapiens
EVQLLESGGGLVQPGGSLRLSCAASGFTFRNYGMAWVRQAPGKGLEWVSWIDASGTETYYADSVKGRFTFSRDNSKNTLYLQMNSLRAEDTAVYYCAKSLGRFDYWGQGTLVTVSS

SEQ ID NO: 210 - protein, 116 aa, Homo sapiens
EVQLLESGGGLVQPGGSLRLSCAASGFTFRNYGMAWVRQAPGKGLEWVSWIDASGTETYYADSVKGRLTISRDNSKNTLYLQMNSLRAEDTAVYYCAKSLGRFDYWGQGTLVTVSS

SEQ ID NO: 211 - protein, 116 aa, Homo sapiens
EVQLLESGGGLVQPGGSLRLSCAASGFTFRNYGMAWVRQAPGKGLEWVSWIDASGTETYYADAVKGRFTISRDNSKNTLYLQMNSLRAEDTAEYYCAKSLGRFDYWGQGTLVTVSS

SEQ ID NO: 212 - protein, 116 aa, Homo sapiens
EVQLLESGGGLVQPGGPLRLSCAASGFTFRNYGMAWVRQAPGKGLEWVSWIDASGTETYYADSVKGRFTISRDNSKNTLYLQMNSLRAEDTAVYYCAKSLGRFDYWGQGTLVTVSS

SEQ ID NO: 213 - protein, 116 aa, Homo sapiens
EVQLLESGGGLVQPGGSLRLSCAASGFTFRNYGMAWVRQAPGKGLEWVSWIDASGTETYYATSVKGRFTISRDNSKNTLYLQMNSLRAEDTAVYYCAKSLGRFDYWGQGTLVTVSS

SEQ ID NO: 214 - protein, 116 aa, Homo sapiens
EVQLLDSGGGLVQPGGSLRLSCAASGFTFRNYGMAWVRQAPGKGLEWVSWIDASGTETYYADSVKGRFTISRDNSKNTLYLQMNSLRAEDTAVYYCAKSLGRFDYWGQGTLVTVSS

SEQ ID NO: 215 - protein, 116 aa, Homo sapiens
EVQLLESGGGLVQPGGSLRLSCAASGFTFRNYGMAWVRQAPGKGLEWVSWIDASGTETYYADSVKGRFTISRDNYKNTLYLQMNSLRAEDTAVYYCAKSLGRFDYWGQGTQVTVSS

SEQ ID NO: 216 - protein, 116 aa, Homo sapiens
  VARIANT 106, 109: Xaa = Any Amino Acid
EVQLLDSGGGLVQPGGSLRLSCAASGFTFRNYGMAWVRQAPGKGLEWVSWIDASGTETYYADSVKGRFTISRDNSKNTLYLQMNSLRAEDTAVYYCAKSLGRFDYXGQXTLVTVSS

SEQ ID NO: 217 - protein, 116 aa, Homo sapiens
EVQLLESGGGSVQPGGSLRLSCAASGFTFRNYGMAWVRQAPGKGLEWVSWIDASGTETYYADSVKGRFTISRDNSKNTLYLQMNSLRAEDTAVYYCAKSLGRFDYWGQGTLVLLSS

SEQ ID NO: 218 - protein, 116 aa, Homo sapiens
EVQLLESRGGLVQPGGSLRLSCAASGFTFRNYGMAWVRQAPGKGLEWVSWIDASGTETYYADSVKGRFTISRDNSKNTLYLQMNSLRAEDTAVYYCAKSLGRFDYWGQGTLVTVSS

SEQ ID NO: 219 - protein, 116 aa, Homo sapiens
EVQLLESEGGLVQPGGSLRLSCAASGFTFRNYGMAWVRQAPGKGLEWVSWIDASGTETYYADSVKGRFTISRDNSKNTLYLQMNSLRAEDTAVYYCAKSLGRFDYWGQGTLVTVSS

SEQ ID NO: 220 - protein, 116 aa, Homo sapiens
EVQLLEYGGGLVQPGGSLRLSCAASGFTFRNYGMAWVRQAPGKGLEWVSWIDASGTETYYADSVKGRFTISRDNSKNTLYLQMNSLRAEDTAVYYCAKSLGRFDYWGKGTLVTVSS

SEQ ID NO: 221 - protein, 116 aa, Homo sapiens
EVQLLESWGGLVQPGGSLRLSCAASGFTFRNYGMAWVRQAPGKGLEWISWIDASGTETYYADPVKGRFTISRDNSKNTLYLQMNSLRAEDTAVYYCAKSLGRFDYWGQGTLVTVSS

SEQ ID NO: 222 - protein, 116 aa, Homo sapiens
EVQLLESGGGLVQPGGSLRLSCAASGYTFRNYGMAWVRQAPGKGLEWVSWIDASGTETYYADSVKGRFTISRDNSKNTLYLQMNSLRAEDTAVYYCAKSLGRFDYWGQGTLVTVSS

SEQ ID NO: 223 - protein, 116 aa, Homo sapiens
  VARIANT 7: Xaa = Any Amino Acid
EVQLLEXGGGLVQPGGSLRLSCTASGFTFRNYGMAWVRQAPGKGLEWVSWIDASGTETYYADSVKGRFTISRDNSKNTLYLQMNSLRAEDTAVYYCAKSLGRFDYWGQGTLVTVSS

SEQ ID NO: 224 - protein, 116 aa, Homo sapiens
EVQLLESGGGLVQPGGSLRLSCAASGFTFRNYGMAWVRQAPGKGLEWVSWIGQYGDETYYADFVKGRFTISRDNSKNTLYLQMNSLRAEDTAVYYCAKSLGRFDYWGQGTLVTVSS

SEQ ID NO: 225 - protein, 116 aa, Homo sapiens
  VARIANT 62: Xaa = Any Amino Acid
EVQLLESGGGLVQPGGSLRLSCAASGFTFRNYGMAWVRQAPGKGLEWVSWISPYGRETYYAXFVKGRFTISRDNSKNTLYLQMNSLRAEDTAVYYCAKSLGRFDYWGQGTLVTVSS

SEQ ID NO: 226 - protein, 116 aa, Homo sapiens
  VARIANT 62: Xaa = Any Amino Acid
EVQLLESGGGLVQPGGSLRLSCAASGFTFRNYGMAWVRQAPGKGLEWVSWIAGSGRETYYAXFVKGRFTISRDNSKNTLYLQMNSLRAEDTAVYYCAKSLGRFDYWGQGTLVTVSS

SEQ ID NO: 227 - protein, 116 aa, Homo sapiens
  VARIANT 62: Xaa = Any Amino Acid
EVQLLESGGGLVQPGGSLRLSCAASGFTFRNYGMAWVRQAPGKGLEWVSWIAGPGTETYYAXFVKGRFTISRDNSKNTLYLQMNSLRAEDTAVYYCAKSLGRFDYWGQGTLVTVSS

SEQ ID NO: 228 - protein, 116 aa, Homo sapiens
  VARIANT 57, 62: Xaa = Any Amino Acid
EVQLLESGGGLVQPGGSLRLSCAASGFTFDQYGMAWVRQAPGKGLEWVSWIDASGTXTYYAXTVKGRFTLSRDNSKNTLYLQMNSLRAEDTAVYYCAKSLGRFDYWGQGTLVTVSS

SEQ ID NO: 229 - protein, 116 aa, Homo sapiens
  VARIANT 62: Xaa = Any Amino Acid
EVQLLESGGGLVQPGGSLRLSCAASGFTFWLYGMAWVRQAPGKGLEWVSWIDASGTETYYAXSVKGRFTISRDNSKNALYLQMNSLRAGDTAVYYCAKSLGRFDYWGQGTLVTVSS

SEQ ID NO: 230 - protein, 116 aa, Homo sapiens
  VARIANT 62: Xaa = Any Amino Acid
EVQLLESGGGLVQPGGSLRLSCAASGFTFGYYGMAWVRQAPGKGLEWVSWIDASGTETYYAXHVKGRFTLSRDNSKNTLYLQMNSLRAEDTAVYYCAKSLGRFDYWGQGTLVTVSS

SEQ ID NO: 231 - protein, 116 aa, Homo sapiens
  VARIANT 62: Xaa = Any Amino Acid
EVQLLESGGGLVQPGGSLRLSCAASGFTFFGYGMAWVRQAPGKGLEWVSWIDASGTETYYAXRVKGRFTVSRDNSKNTLYLQMNSLRAEDTAVYYCAKSLGRFDYWGQGTLVTVSS

SEQ ID NO: 232 - protein, 116 aa, Homo sapiens
  VARIANT 3, 62, 76: Xaa = Any Amino Acid
EVXLLESGGGLVQPGGSLRLSCAASGFTFSDYGMAWVRQAPGKGLEWVSWIDASGTETYYAXPVKGRFTLSRDNSXNTLYLQMNSLRAEDTAVYYCAKSLGRFDYWGQGTLVTVSS

SEQ ID NO: 233 - protein, 116 aa, Homo sapiens
  VARIANT 62: Xaa = Any Amino Acid
EVQLLESGGGLVQPGGSLRLSCAASGFTFFLYGMAWVRQAPGKGLEWVSWIDASGTETYYAXPVKGRFTISRDNSKNTLYLQMNSLRAEDTAVYYCAKSLGRFDYWGQGTLVTVSS

SEQ ID NO: 234 - protein, 116 aa, Homo sapiens
  VARIANT 3, 30, 62, 76: Xaa = Any Amino Acid
EVXLLESGGGLVQPGGSLRLSCAASGFTFXYYGMAWVRQAPGKGLEWVSWIDASGTETYYAXKVKGRFTLSRDNSXNTLYLQMNSLRAEDTAVYYCAKSLGRFDYWGQGTLVTVSG

SEQ ID NO: 235 - protein, 116 aa, Homo sapiens
  VARIANT 62: Xaa = Any Amino Acid
EVQLLESGGGLVQPGGSLRLSCAASGFTFSNYGMAWVRQAPGKGLEWVSWIDASGTETYYAXMVKGRFTVSRDNSKNTLYLQMNSLRAEDTAVYYCAKSLGRFDYWGQGTLVTVSS

SEQ ID NO: 236 - protein, 116 aa, Homo sapiens
  VARIANT 62: Xaa = Any Amino Acid
EVQLLESGGGLVQPGGSLRLSCAASGFTFGEYGMAWVRQAPGKGLEWVSWIDASGTETYYAXPVKGRFTLSRDNSKNALYLQMNSLRAEDTAVYYCAKSLGRFDYWGQGTLVTVSS

SEQ ID NO: 237 - protein, 116 aa, Homo sapiens
  VARIANT 62: Xaa = Any Amino Acid
EVQLLESGGGLVQPGGSLRLSCAASGFTFKHYGMAWVRQAPGKGLEWVSWIDASGTETYYAXSVKGRFTLSRDNSKNTLYLQMNSLRAEDTAVYYCAKSLGRFDYWGQGTLVTVSS

SEQ ID NO: 238 - protein, 116 aa, Homo sapiens
  VARIANT 57, 62, 63: Xaa = Any Amino Acid
EVQLLESGGGLVQPGGSLRLSCAASGFTFPYYGMAWVRQAPGKGLEWVSWIDASGTXTYYAXXVKGRFTLSRDNSKNTLYLQMNSLRAEDTAVYYCAKSLGRFDYWGQGTLVTVSS

SEQ ID NO: 239 - protein, 116 aa, Homo sapiens
EVQLLESGGGLVQPGGSLRLSCAASGFTFRKYGMAWVRQAPGKGLEWVSWIDASGTETYYADTVKGRFTISRDNSKNTLYLQMNSLRAEDTAVYYCAKSLGRFDYWGQGTLVTVSS

SEQ ID NO: 240 - protein, 116 aa, Homo sapiens
  VARIANT 62: Xaa = Any Amino Acid
EVQLLESGGGLVQPGGSLRLSCAASGFTFLMYGMAWVRQAPGKGLEWVSWIDASGTETYYAXPVKGRFTISRDNSKNTLYLQMNSLRAEDTAVYYCAKSLGRFDYWGQGTLVTVSS

SEQ ID NO: 241 - protein, 116 aa, Homo sapiens
  VARIANT 3: Xaa = Any Amino Acid
EVXLLESGGGLVQPGGSLRLSCAASGFTFNNYGMAWVRQAPGKGLEWVSWIDASGTETYYADTVKGRFTMSRDNSKNTLYLQMNSLRAEDTAVYYCAKSLGRFDYWGQGTLVTVSS

SEQ ID NO: 242 - protein, 116 aa, Homo sapiens
  VARIANT 62, 63: Xaa = Any Amino Acid
EVQLLESGGGLVQPGGSLRLSCAASGFTFGEYGMAWVRQAPGKGLEWVSWIDASGTETYYAXXVKGRFTISRDNSKNTLYLQMNSLRAEDTAVYYCAKSLGRFDYWGQGTLVTVSS

SEQ ID NO: 243 - protein, 116 aa, Homo sapiens
  VARIANT 3, 52, 62: Xaa = Any Amino Acid
EVXLLESGGGLVQPGGSLRLSCAASGFTFRNYGMAWVRQAPGKGLEWVSWIXGSGRETYYAXFVKGRFTISRDNSKNTLYLQMNSLRAEDTAVYYCAKSLGRFDYWGQGTLVTVSS

SEQ ID NO: 244 - protein, 116 aa, Homo sapiens
  VARIANT 57, 62: Xaa = Any Amino Acid
EVQLLESGGGLVQPGGSLRLSCAASGFTFRNYGMAWVRQAPGKGLEWVSWISGRGYXTYYAXFVKGRFTISRDNSKNTLYLQMNSLRAEDTAVYYCAKSLGRFDYWGQGTLVTVSS

SEQ ID NO: 245 - protein, 116 aa, Homo sapiens
  VARIANT 62: Xaa = Any Amino Acid
EVQLLESGGGLVQPGGSLRLSCAASGFTFRNYGMAWVRQAPGKGLEWVSWISSSGGETYYAXFVKGRFTISRDNSKNTLYLQMNSLRAEDTAVYYCAKSLGRFDYWGQGTLVTVSS

SEQ ID NO: 246 - protein, 116 aa, Homo sapiens
  VARIANT 53: Xaa = Any Amino Acid
EVQLLESGGGLVQPGGSLRLSCAASGFTFRNYGMAWVRQAPGKGLEWVSWISXNGRETYYADFVKGRFTISRDNSKNTLYLQMNSLRAEDTAVYYCAKSLGRFDYWGQGTLVTVSS

SEQ ID NO: 247 - protein, 116 aa, Homo sapiens
  VARIANT 62: Xaa = Any Amino Acid
EVQLLESGGGLVQPGGSLRLSCAASGFTFRNYGMAWVRQAPGKGLEWVSWISGKGLETYYAXFVKGRFTISRDNSKNTLYLQMNSLRAEDTAVYYCAKSLGRFDYWGQGTLVTVSS

SEQ ID NO: 248 - protein, 116 aa, Homo sapiens
  VARIANT 62: Xaa = Any Amino Acid
EVQLLESGGGLVQPGGSLRLSCAASGFTFRNYGMAWVRQAPGKGLEWVSWIQANGGETYYAXFVKGRFTISRDNSKNTLYLQMNSLRAEDTAVYYCAKSLGRFDYWGQGTLVTVSS

SEQ ID NO: 249 - protein, 116 aa, Homo sapiens
  VARIANT 62: Xaa = Any Amino Acid
EVQLLESGGGLVQPGGSLRLSCAASGFTFRNYGMAWVRQAPGKGLEWVSWIHSSGSETYYAXFVKGRFTISRDNSKNTLYLQMNSLRAEDTAVYYCAKSLGRFDYWGQGTLVTVSS

SEQ ID NO: 250 - protein, 116 aa, Homo sapiens
  VARIANT 62: Xaa = Any Amino Acid
EVQLLESGGGLVQPGGSLRLSCAASGFTFRNYGMAWVRQAPGKGLEWVSWIDGRGSETYYAXFVKGRFTISRDNSKNTLYLQMNSLRAEDTAVYYCAKSLGRFDYWGQGTLVTVSS

SEQ ID NO: 251 - protein, 116 aa, Homo sapiens
  VARIANT 62: Xaa = Any Amino Acid
EVQLLESGGGLVQPGGSLRLSCAASGFTFRNYGMAWVRQAPGKGLEWVSWINGRGSETYYAXFVKGRFTISRDNSKNTLYLQMNSLRAEDTAVYYCAKSLGRFDYWGQGTLVTVSS

SEQ ID NO: 252 - protein, 116 aa, Homo sapiens
  VARIANT 62: Xaa = Any Amino Acid
EVQLLESGGGLVQPGGSLRLSCAASGFTFRNYGMAWVRQAPGKGLEWVSWISGRGSETYYAXFVKGRFTISRDNSKNTLYLQMNSLRAEDTAVYYCAKSLGRFDYWGQGTLVTVSS

SEQ ID NO: 253 - protein, 116 aa, Homo sapiens
  VARIANT 3, 62: Xaa = Any Amino Acid
EVXLLESGGGLVQPGGSLRLSCAASGFTFRNYGMAWVRQAPGKGLEWVSWIHSLGGETYYAXFVKGRFTISRDNSKNTLYLQMNSLRAEDTAVYYCAKSLGRFDYWGQGTLVTVSS

SEQ ID NO: 254 - protein, 116 aa, Homo sapiens
  VARIANT 62: Xaa = Any Amino Acid
EVQLLESGGGLVQPGGSLRLSCAASGFTFRNYGMAWVRQAPGKGLEWVSWIAGNGQETYYAXFVKGRFTISRDNSKNTLYLQMNSLRAEDTAVYYCAKSLGRFDYWGQGTLVTVSS

SEQ ID NO: 255 - protein, 116 aa, Homo sapiens
EVQLLESGGGLVQPGGSLRLSCAASGFTFRNYGMAWVRQAPGKGLEWVSWINSNGRETYYADFVKGRFTISRDNSKNTLYLQMNSLRAEDTAVYYCAKSLGRFDYWGQGTLVTVSS

SEQ ID NO: 256 - protein, 116 aa, Homo sapiens
  VARIANT 62: Xaa = Any Amino Acid
EVQLLESGGGLVQPGGSLRLSCAASGFTFRNYGMAWVRQAPGKGLEWVSWIDGYGKETYYAXFVKGRFTISRDNSKNTLYLQMNSLRAEDTAVYYCAKSLGRFDYWGQGTLVTVSS

SEQ ID NO: 257 - protein, 116 aa, Homo sapiens
  VARIANT 62: Xaa = Any Amino Acid
EVQLLESGGGLVQPGGPLRLSCAASGFTFRTYGMAWVRQAPGKGLEWVSWIDASGTETYYAXNVKGRFTISRDNSKNTLYLQMNSLRAEDTAVYYCAKSLGRFDYWGQGTLVTVSS

SEQ ID NO: 258 - protein, 116 aa, Homo sapiens
  VARIANT 62: Xaa = Any Amino Acid
EVQLLESGGGLVQPGGSLRLSCAASGFTFWYYGMAWVRQAPGKGLEWVSWIDASGTETYYAXTVKGRFTLSRDNSKNTLYLQMNSLRAEDTAVYYCAKSLGRFDYWGQGTLVTVSS

SEQ ID NO: 259 - protein, 116 aa, Homo sapiens
  VARIANT 62: Xaa = Any Amino Acid
EVQLLESGGGLVQPGGSLRLSCAASGFTFNGYGMAWVRQAPGKGLEWVSWIDASGTETYYAXTVKGRFTLSRDNSKNTLYLQMNSLRAEDTAVYYCAKSLGRFDYWGQGTLVTVSS

SEQ ID NO: 260 - protein, 116 aa, Homo sapiens
  VARIANT 63: Xaa = Any Amino Acid
EVQLLESGGGLVQPGGSLRLSCAASGFTFSEYGMAWVRQAPGKGLEWVSWIDASGTETYYADXVKGRFTISRDNSKNTLYLQMNSLRAEDTAVYYCAKSLGRFDYWGQGTLVTVSS

SEQ ID NO: 261 - protein, 116 aa, Homo sapiens
  VARIANT 62: Xaa = Any Amino Acid
EVQLLESGGGLVQPGGSLRLSCAASGFTFGAYGMAWVRQAPGKGLEWVSWIDASGTETYYAXPVKGRFTMSRDNSKNTLYLQMNSLRAEDTAVYYCAKSLGRFDYWGQGTLVTVSS

SEQ ID NO: 262 - protein, 116 aa, Homo sapiens
  VARIANT 3, 30, 57, 62: Xaa = Any Amino Acid
EVXLLESGGGLVQPGGSLRLSCAASGFTFXQYGMAWVRQAPGKGLEWVSWIDASGTXTYYAXTVKGRFTSSRDNSKNTLYLQMNSLRAEDTAVYYCAKSLGRFDYWGQGTLVTVSS

SEQ ID NO: 263 - protein, 116 aa, Homo sapiens
  VARIANT 31, 57, 62: Xaa = Any Amino Acid
EVQLLESGGGLVQPGGSLRLSCAASGFTFFXYGMGWVRQAPGKGLEWVSWIDASGTXTYYAXPVKGRFTSSRDNSKNTLYLQMNSLRAEDTAVYYCAKSLGRFDYWGQGTLVTVSS

SEQ ID NO: 264 - protein, 116 aa, Homo sapiens
  VARIANT 62: Xaa = Any Amino Acid
EVQLLESGGGLVQPGGSLRLSCAASGFTFRVYGMAWVRQAPGKGLEWVSWIDASGTETYYAXPVKGRFTISRDNSKNTLYLQMNSLRAEDTAVYYCAKSLGRFDYWGQGTLVTVSS

SEQ ID NO: 265 - protein, 116 aa, Homo sapiens
EVQLLESGGGLVQPGGSLRLSCAASGFTFPSYGMAWVRQAPGKGLEWVSWIDASGTETYYADTVKGRFTLSRDNSKNTLYLQMNSLRAEDTAVYYCAKSLGRFDYWGQGTLVTVSS

SEQ ID NO: 266 - protein, 116 aa, Homo sapiens
  VARIANT 62, 76: Xaa = Any Amino Acid
EVQLLESGGGLVQPGGSLRLSCAASGFTFGSYGMAWVRQAPGKGLEWVSWIDASGTETYYAXLVKGRFTISRDNSXNTLYLQMNSLRAEDTAVYYCAKSLGRFDYWGQGTLVTVSS

SEQ ID NO: 267 - protein, 116 aa, Homo sapiens
  VARIANT 62: Xaa = Any Amino Acid
EVQLLESGGGLVQPGGSLRLSCAASGFTFDHYGMAWVRQAPGKGLEWVSWIDASGTETYYAXSVKGRFTVSRDNSKNTLYLQMNSLRAEDTAVYYCAKSLGRFDYWGQGTLVTVSS

SEQ ID NO: 268 - protein, 116 aa, Homo sapiens
EVQLLESGGGLVQPGGSLRLSCAASGFTFDHYGMAWVRQAPGKGLEWVSWIDASGTETYYADTVKGRFTSSRDNSKNALYLQMNSLRAEDTAVYYCAKSLGRFDYWGQGTLVTVSS

SEQ ID NO: 269 - protein, 116 aa, Homo sapiens
  VARIANT 62: Xaa = Any Amino Acid
EVQLLESGGGLVQPGGSLRLSCAASGFTFFSYGMAWVRQAPGKGLEWVSWIDASGTETYYAXPVKGRFTLSRDNSKNTLYLQMNSLRAEDTAVYYCAKSLGRFDYWGQGTLVTVSS

SEQ ID NO: 270 - protein, 116 aa, Homo sapiens
  VARIANT 62: Xaa = Any Amino Acid
EVQLLESGGGLVQPGGSLRLSCAASGFTFRGYGMAWVRQAPGKGLEWVSWIDASGTETYYAXTVKGRFTVSRDNSKNTLYLQMNSLRAEDTAVYYCAKSLGRFDYWGQGTLVTVSS

SEQ ID NO: 271 - protein, 116 aa, Homo sapiens
  VARIANT 62: Xaa = Any Amino Acid
EVQLLESGGGLVQPGGSLRLSCAASGFTFRNYGMAWVRQAPGKGLEWVSWIAAQGRETYYAXFVKGRFTISRDNSKNTLYLQMNSLRAEDTAVYYCAKSLGRFDYWGQGTLVTVSS

SEQ ID NO: 272 - protein, 116 aa, Homo sapiens
EVQLLESGGGLVQPGGSLRLSCAASGFTFRNYGMAWVRQAPGKGLEWVSWIDASGTETYYADSVKGRFTISRDNSKNTLYLQMNSLRAEDTAVYYCAKELGRFDYWGQGTLVTVSS

SEQ ID NO: 273 - protein, 116 aa, Homo sapiens
EVQLLESGGGLVQPGGSLRLSCAASGFTFRNYGMAWVRQAPGKGLEWVSWIDASGTETYYADSVKGRFTISRDNSKNTLYLQMNSLRAEDTAVYYCAKPLGRFDYWGQGTLVTVSS

SEQ ID NO: 274 - protein, 116 aa, Homo sapiens
EVQLLESGGGLVQPGGSLRLSCAASGFTFRNYGMAWVRQAPGKGLEWVSWIDASGTETYYADSVKGRFTISRDNSKNTLYLQMNSLRAEDTAVITVRNGWGVLTTGVREPWSPSRA

SEQ ID NO: 275 - protein, 116 aa, Homo sapiens
EVQLLESGGGLVQPGGSLRLSCAASGFTFRNYGMAWVRQAPGKGLEWVSWIDASGTETYYADSVKGRFTISRDNSKNTLYLQMNSLRAEDTAVYYCAKTLGRFDYWGQGTLVTVSS

SEQ ID NO: 276 - protein, 116 aa, Homo sapiens
EVQLLESGGGLVQPGGSLRLSCAASGFTFRNYGMAWVRQAPGKGLEWVSWIDASGTETYYADSVKGRFTISRDNSKNTLYLQMNSLRAEDTAVYYCAKGLGRFDYWGQGTLVTVSS

SEQ ID NO: 277 - protein, 116 aa, Homo sapiens
EVQLLESGGGLVQPGGSLRLSCAASGFTFRNYGMAWVRQAPGKGLEWVSWIDASGTETYYADSVKGRFTISRDNSKNTLYLQMNSLRAEDTAVYYCAKSEGRFDYWGQGTLVTVSS

SEQ ID NO: 278 - protein, 116 aa, Homo sapiens
EVQLLESGGGLVQPGGSLRLSCAASGFTFRNYGMAWVRQAPGKGLEWVSWIDASGTETYYADSVKGRFTISRDNSKNTLYLQMNSLRAEDTAVYYCAKSHGRFDYWGQGTLVTVSS

SEQ ID NO: 279 - protein, 116 aa, Homo sapiens
EVQLLESGGGLVQPGGSLRLSCAASGFTFRNYGMAWVRQAPGKGLEWVSWIDASGTETYYADSVKGRFTISRDNSKNTLYLQMNSLRAEDTAVYYCAKSSGRFDYWGQGTLVTVSS

SEQ ID NO: 280 - protein, 116 aa, Homo sapiens
EVQLLESGGGLVQPGGSLRLSCAASGFTFRNYGMAWVRQAPGKGLEWVSWIDASGTETYYADSVKGRFTISRDNSKNTLYLQMNSLRAEDTAVYYCAKSAGRFDYWGQGTLVTVSS

SEQ ID NO: 281 - protein, 116 aa, Homo sapiens
EVQLLESGGGLVQPGGSLRLSCAASGFTFRNYGMAWVRQAPGKGLEWVSWIDASGTETYYADSVKGRFTISRDNSKNTLYLQMNSLRAEDTAVYYCAKSNGRFDYWGQGTLVTVSS

SEQ ID NO: 282 - protein, 116 aa, Homo sapiens
EVQLLESGGGLVQPGGSLRLSCAASGFTFRNYGMAWVRQAPGKGLEWVSWIDASGTETYYADSVKGRFTISRDNSKNTLYLQMNSLRAEDTAVYYCAKSLPRFDYWGQGTLVTVSS

SEQ ID NO: 283 - protein, 116 aa, Homo sapiens
EVQLLESGGGLVQPGGSLRLSCAASGFTFRNYGMAWVRQAPGKGLEWVSWIDASGTETYYADSVKGRFTISRDNSKNTLYLQMNSLRAEDTAVYYCAKSLGRWDYWGQGTLVTVSS

SEQ ID NO: 284 - protein, 116 aa, Homo sapiens
EVQLLESGGGLVQPGGSLRLSCAASGFTFRNYGMAWVRQAPGKGLEWVSWIDASGTETYYADSVKGRFTISRDNSKNTLYLQMNSLRAEDTAVYYCAKSLGRLDYWGQGTLVTVSS

SEQ ID NO: 285 - protein, 116 aa, Homo sapiens
EVQLLESGGGLVQPGGSLRLSCAASGFTFRNYGMAWVRQAPGKGLEWVSWIDASGTETYYADSVKGRFTISRDNSKNTLYLQMNSLRAEDTAVYYCAKSLGRFPYWGQGTLVTVSS

SEQ ID NO: 286 - protein, 116 aa, Homo sapiens
EVQLLESGGGLVQPGGSLRLSCAASGFTFRNYGMAWVRQAPGKGLEWVSWIDASGTETYYADSVKGRFTISRDNSKNTLYLQMNSLRAEDTAVYYCAKSLGRFDVWGQGTLVTVSS

SEQ ID NO: 287 - protein, 116 aa, Homo sapiens
EVQLLESGGGLVQPGGSLRLSCAASGFTFRNYGMAWVRQAPGKGLEWVSWIDASGTETYYADSVKGRFTISRDNSKNTLYLQMNSLRAEDTAVYYCAKSLGGFDYWGQGTLVTVSS

SEQ ID NO: 288 - protein, 116 aa, Homo sapiens; identical to SEQ ID NO: 214

SEQ ID NO: 289 - protein, 116 aa, Homo sapiens
EVQLLESGGGLVQPGGSLRLSCAASGFTFRNYGMAWVRQAPGKGLEWVSWIDASGTETYYADPVKGRFTISRDNSKNTLYLQMNSLRAEDTAVYYCAKSLGRFDYWGQGTLVTVSS

SEQ ID NO: 290 - protein, 116 aa, Homo sapiens
EVQLLESGGGLVQPGGSLRLSCAASGFTFRNYGMAWVRQAPGKGLEWVSWIDASGTETYYADPVKGRFTLSRDNSKNTLYLQMNSLRAEDTAVYYCAKSLGRFDYWGQGTLVTVSS

SEQ ID NO: 291 - protein, 116 aa, Homo sapiens
EVQLLDSGGGLVQPGGSLRLSCAASGFTFRNYGMAWVRQAPGKGLEWVSWIDASGTETYYADPVKGRFTLSRDNSKNTLYLQMNSLRAEDTAVYYCAKSLGRFDYWGQGTLVTVSS

SEQ ID NO: 292 - protein, 116 aa, Homo sapiens
EVQLLDSGGGLVQPGGSLRLSCAASGFTFRNYGMAWVRQAPGKGLEWVSWIDASGTETYYADPVKGRFTISRDNSKNTLYLQMNSLRAEDTAVYYCAKSLGRFDYWGQGTLVTVSS

SEQ ID NO: 293 - protein, 116 aa, Homo sapiens
EVQLLESGGGLVQPGGSLRLSCAASGFTFLHHGMAWVRQAPGKGLEWVSWIDASGTETYYADSVRGRFTISRDNSKNTLYLQMNSLRAEDTAVYYCAKSLGRFDYWGQGTLVTVSS

SEQ ID NO: 294 - protein, 116 aa, Homo sapiens
EVQLLESGGGLVQPGGSLRLSCAASGFTFRNHGMGWVRQAPGKGLEWVSWIDASGTETYYADSVKGRFTISRDNSKNTLYLQMNSLRAEDAAVYYCAKSLGRFDYWGQGTLVTVSS

SEQ ID NO: 295 - protein, 116 aa, Homo sapiens
EVQLLESGGGLVQPGGSLRLSCAASGFTFRNFGMGWVRQAPGKGLEWVSWIDASGTETYYADSVKGRLTISRDNSKNTLYLQMNSLRAEDTAVYYCAKSLGRFDYWGQGTLVTVSS

SEQ ID NO: 296 - protein, 116 aa, Homo sapiens
EVQLLESGGGLVQPGGSLRLSCAASGFTFRNYGMAWVRQAPGKGLEWVSWILGSGTETYYADSVKGRFTISRDNSRNTLYLQMNSLRAEDTAVYYCAKSLGRFDYWGQGTLVTVSS

SEQ ID NO: 297 - protein, 116 aa, Homo sapiens
EVQLLESGGGLVQPGGSLRLSCAASGFTFRNYGMAWVRQAPGKGLEWVSWIISSGTETYYADSVKGRFTISRDNSKNTLYLQMNSLRAEDTAVYYCAKSLGRFDYWGQGTLVTVSS

SEQ ID NO: 298 - protein, 116 aa, Homo sapiens
EVQLLESGGGLVQPGGSLRLSCAASGFTFRNYGMAWVRQAPGKGLEWVSWILSSGTETYYADSVKGRFTISRDNSKNTLYLQMNSLRAEDTAVYYCAKSLGRFDYWGQGTLVTVSS

SEQ ID NO: 299 - protein, 116 aa, Homo sapiens
EVQLLESGGGLVQPGGSLRLSCAASGFTFRNYGMAWVRQAPGKGLEWVSFILPSGTETYYADSVKGRFTISRDNSKNTLYLQMNSLRAEDTAVYYCAKSLGRFDYWGQGTLVTVSS

SEQ ID NO: 300 - protein, 116 aa, Homo sapiens
EVQLLESGGGLVQPGGSLRLSCAASGFTFRNYGMAWVRQAPGKGLEWVSWIRGSGTETYYADSVKGRFTISRDNSRNTLYLQMNSLRAEDTAVYYCAKSLGRFDYWGQGTLVTVSS

SEQ ID NO: 301 - protein, 116 aa, Homo sapiens
EVQLLESGGGLVQPGGSLRLSCAASGFTFRNYGMAWVRQAPGKGLEWVSWIRGSGTETYYADSVKGRFTISRDNSKNTLYLQMNSLRAEDTAVYYCAKSLGRFDYWGQGTLVTVSS

SEQ ID NO: 302 - protein, 116 aa, Homo sapiens
EVQLLESGGGLVQPGGSLRLSCAASGFTFRNYGMAWVRQAPGKGLEWVSWIDAKGKETYYADSVKGRFTISRDNSKNTLYLQMNSLRAEDTAVYYCAKSLGRFDYWGQGTLVTVSS

SEQ ID NO: 303 - protein, 116 aa, Homo sapiens
EVQLLESGGGLVQPGGSLRLSCAASGFTFRNYGMAWVRQAPGKGLEWVSWIDAKGRETYYADSVKGRFTISRDNSKNTLYLQMNSLRAEDTAVYYCAKSLGRFDYWGQGTLVTVSS

SEQ ID NO: 304 - protein, 116 aa, Homo sapiens
EVQLLESGGGLVQPGGSLRLSCAASGFTFRNYGMAWVRQAPGKGLEWVSWIVGGGTETYYADSVKGRFTISRDNSKNTLYLQMNSLRAEDTAVYYCAKSLGRFDYWGQGTLVTVSS

SEQ ID NO: 305 - protein, 116 aa, Homo sapiens
EVQLLESGGGLVQPGGSLRLSCAASGFTFRNYGMAWVRQAPGKGLEWVSWIEGGGTETYYADSVKGRFTISRDNSKNTLYLQMNSLRAEDTAVYYCAKSLGRFDYWGQGTLVTVSS

SEQ ID NO: 306 - protein, 116 aa, Homo sapiens
EVQLLESGGGLVQPGGSLRLSCAASGFTFRNYGMAWVRQAPGKGLEWVSWIVGQGTETYYADSVKGRFTISRDNSKNTLYLQMNSLRAEDTAVYYCAKSLGRFDYWGQGTLVTVSS

SEQ ID NO: 307 - protein, 116 aa, Homo sapiens
EVQLLESGGGLVQPGGSLRLSCAASGFTFRNYGMAWVRQAPGKGLEWVSWIVGSGTETYYADSVKGRFTISRDNSKNTLYLQMNSLRAEDTAVYYCAKSLGRFDYWGQGTLVTVSS

SEQ ID NO: 308 - protein, 116 aa, Homo sapiens
EVQLLESGGGLVQPGGSLRLSCAASGFTFRNYGMAWVRQAPGKGLEWVSWIHNTGTETYYADSVKGRFTISRDNSKNTLYLQMNSLRAEDTAVYYCAKSLGRFDYWGQGTLVTVSS

SEQ ID NO: 309 - protein, 116 aa, Homo sapiens
EVQLLESGGGLVQPGGSLRLSCAASGFTFHPHGMAWVRQAPGKGLEWVSWIDASGTETYYADSVKGRFTISRDNSKNTLYLQMNSLRAEDTAVYYCAKSLGRFDYWGQGTLATVSS

SEQ ID NO: 310 - protein, 116 aa, Homo sapiens
EVQLLESGGGLVQPGGSLRLPCAASGFTFRNFGMGWVRQAPGKGLEWVSWIDASGTETYYADSVKGRFTISRDNSKNTLYLQMNSLRAEDTAVYYCAKSLGRFDYWGQGTLVTVSS

SEQ ID NO: 311 - protein, 116 aa, Homo sapiens
EVQLLESGGGLVQPGGSLRLSCAASGFTFRNFGMGWVRQAPGKGLEWVSWIDASGTETYYADSVKGRFTISRDNSKNTLYLQMNSLRAEDTAVYYCAKSLGRFDYWGQGTLVTVSS

SEQ ID NO: 312 - protein, 116 aa, Homo sapiens
EVQLLESGGGLVQPGGSLRLSCAASGFTFRNYGMAWVRQAPGKGLEWVSFIHSSGTETYYADSVKGRFTISRDNSKNTLYLQMNSLRAEDTAVYYCAKSLGRFDYWGQGTLVTVSS

SEQ ID NO: 313 - protein, 116 aa, Homo sapiens
EVQLLESGGGLVQPGGSLRLSCAASGFTFRNYGMAWVRQAPGKGLEWVSWIESSGTETYYADSVKGRFTISRDNSKNTLYLQMNSLRAEDTAVYYCAKSLGRFDYWGQGTLVTVSS

SEQ ID NO: 314 - protein, 116 aa, Homo sapiens
EVQLLESGGGLVQPGGSLRLSCAASGFTFRNYGMAWVRQAPGKGLEWVSWILNSGTETYYADSVKGRFTISRDNSKNTLYLQMNSLRAEDTAVYYCAKSLGRFDYWGQGTLVTVSS

SEQ ID NO: 315 - protein, 116 aa, Homo sapiens
EVQLLESGGGLVQPGGSLRLSCAASGFTFRNYGMAWVRQAPGKGLEWVSWIQNSGTETYYADSVKGRFTISRDNSKNTLYLQMNSLRAEDTAVYYCAKSLGRFDYWGQGTLVTVSS

SEQ ID NO: 316 - protein, 116 aa, Homo sapiens
EVQLLESGGGLVQPGGSLRLSCAATGFTFRNYGMAWVRQAPGKGLEWVSWIVGSGTETYYADSVKGRFTISRDNSKNTLYLQMNSLRAEDTAVYYCAKSLGRFDYWGQGTLVTVSS

SEQ ID NO: 317 - protein, 116 aa, Homo sapiens
EVQLLESGGGLVQPGGSLRLSCAASGFTFRNYGMAWVRQAPGKGLEWVSFILSSGTETYYADSVKGRFTISRDNSKNTLYLQMNSLRAEDTAVYYCAKSLGRFDYWGQGTLVTVSS

SEQ ID NO: 318 - protein, 116 aa, Homo sapiens
EVQLLESGGGLVQPGGSLRLFCAASGFTFRNYGMAWVRQAPGKGLEWVSWIDAKGRETYYADSVKGRFTISRDNSKNTLYLQMNSLRAEDTAVYYCAKSLGRFDYWGQGTLVTVSS

SEQ ID NO: 319 - protein, 116 aa, Homo sapiens
EVQLLESGGGLVQPGGSLRLSCAASGFTFRNYGMAWVRQAPGKGLEWVSWIDAKGKETYYADSVKGRFTISRDNSKNTLYLQMNSLRAEDTAVYYCAKSLGRFDYWGQGTLVTASS

SEQ ID NO: 320 - protein, 116 aa, Homo sapiens
EVQLLESGGGLVQPGGSLRLSCAASGFTFRNYGMAWVRQAPGKGLEWVSWIEGRGTETYYADSVKGRFTISRDNSKNTLYLQMNSLRAEDTAVYYCAKSLGRFDYWGQGTLVTVSS

SEQ ID NO: 321 - protein, 116 aa, Homo sapiens
EVQLLESGGGLVQPGGSLRLSCAASGFTFRNYGMAWVRQAPGKGLEWVSWIDASGTETYYADSVKGRFTISRGNSKNTLYLQMNSLRAEDTAVYYCAKSLGRFDYWGQGTLVTVSS

SEQ ID NO: 322 - protein, 116 aa, Homo sapiens
EVQLLESGGGLVQPGGSLRLSCAASGFTFRNYGMAWVRQAPGKGLEWVSWIVGGGTETYYADSVKGRFAISRDNSKNTLYLQMNSLRAEDTAVYYCAKSLGRFDYWGQGTLVTVSS

SEQ ID NO: 323 - protein, 116 aa, Homo sapiens
EVQLLESGGGLVQPGGSPRLSCAASGFTFKENGMAWVRQASGKGLEWVSWIDASGTETYYADSVKGRFTISRDNSKNTLYLQMNSLRAEDTAVYYCAKSLGRFDYWGQGTLVTVSS

SEQ ID NO: 324 - protein, 116 aa, Homo sapiens
EVQLLESGGGLVQPGGSLRLSCAASGFTFRNYGMGWVRQAPGKGLEWVSWIDASGTETYYADSVKGRFTISRDNSKNTLYLQMNSLRAEDAAVYYCAKSLGRFDYWGQGTLVTVSS

SEQ ID NO: 325 - protein, 116 aa, Homo sapiens
EVQLLESGGGLVQPGGSLRLSCAASGFTFRNFGMGWVRQAPGKGLEWVSWIDASGTETYYADSVKGRFTISRDNSKNTLYLQMNSLRAEDAAVYYCAKSLGRFDYWGQGTLVTVSS

SEQ ID NO: 326 - protein, 116 aa, Homo sapiens
EVQLLESGGGLVQPGGSLRLSCAASGFTFRNYGMAWVRQAPGKGLEWVSFILPSGTETYYADSVKGRFTISRDNSKNTLYLQMNSLRAEDAAVYYCAKSLGRFDYWGQGTLVTVSS

SEQ ID NO: 327 - protein, 116 aa, Homo sapiens
EVQLLESGGGLVQPGGSLRLSCAASGFTFRNYGMAWVRQAPGKGLEWVSFIVGSGTETYYADSVKGRFTISRDNSKNTLYLQMNSLRAEDTAVYYCAKSLGRFDYWGQGTLVTVSS

SEQ ID NO: 328 - protein, 116 aa, Homo sapiens
EVQLLESGGGLVQPGGSLRLSCAASGFTFRNYGMAWVRQAPGKGLEWVSWITWSGTETYYADSVKGRFTISRDNSKNTLYLQMNSLRAEDTAVYYCAKSLGRFDYWGQGTLVTVSS

SEQ ID NO: 329 - protein, 116 aa, Homo sapiens
EVQLLESGGGLVQPGGSLRLSCAASGFTFRNYGMAWVRQAPGKGLEWVSFIVSSGTETYYADSVKGRFTISRDNSKNTLYLQMNSLRAEDTAVYYCAKSLGRFDYWGQGTLVTVSS

SEQ ID NO: 330 - protein, 116 aa, Homo sapiens
EVQLLESGGGLVQPGGSLRLSCAASGFTFRNYGMAWVRQAPGKGLEWVSWITNSGTETYYADSVKGRFTISRDNSKNTLYLQMNSLRAEDTAVYYCAKSLGRFDYWGQGTLVAVSS

SEQ ID NO: 331 - protein, 116 aa, Homo sapiens
EVQLLESGGGLVQPGGSLRLSCAASGFTFRNYGMAWVRQAPGKGLEWVSWILASGTETYYADSVKGRFTISRDNSKNTLYLQMNSLRAEDTAVYYCAKSLGRFDYWGQGTLVTVSS

SEQ ID NO: 332 - protein, 116 aa, Homo sapiens
EVQLLESGGGLVQPGGSLRLFCAASGFTFRNYGMAWVRQAPGKGLEWVSWIDAKGNETYYADSVKGRFTISRDNSKNTLYLQMNSLRAEDTAVYYCAKSLGRFDYWGQGTLVTVSS

SEQ ID NO: 333 - protein, 116 aa, Homo sapiens
EVQLLESGGGLVQPGGSLRLSCAASGFTFRNYGMAWVRQAPGKGLEWVSWIDAKGKETYYADSVKGRFTISRDNSKNTLYLQMNSLRAEDTAVYYCAKSLGRFDYWGQGALVTVSS

SEQ ID NO: 334 - protein, 116 aa, Homo sapiens
EVQLLESGGGLVQPGGSLRLSCAASGFTFRNYGMAWVRQAPGKGLEWVSWIDAMGKETYYADSVKGRFTISRDNSKNTLYLQMNSLRAEDTAVYYCAKSLGRFDYWGQGTLVTVSS

SEQ ID NO: 335 - protein, 116 aa, Homo sapiens
EVQLLESGGGLVQPGGSLRLSCAASGFTFRNYGMAWVRQAPGKGLEWVSWIDASSTETYYADSVKGRFTISRDNSKNTLYLQMNSLRAEDTAVYYCAKSLGRFDYWGQGTLVTVSS

SEQ ID NO: 336 - protein, 116 aa, Homo sapiens
EVQLLESGGGLVQPGGSLRLSCAASGFTFRNFGMGWVRQAPGKGLEWVSWILGSGTETYYADSVKGRFTISRDNSRNTLYLQMNSLRAEDTAVYYCAKSLGRFDYWGQGTLVTVSS

SEQ ID NO: 337 - protein, 116 aa, Homo sapiens
EVQLLESGGGLVQPGGSLRLSCAASGFTFRNFGMGWVRQAPGKGLEWVSWIVGSGTETYYADSVKGRFTISRDNSKNTLYLQMNSLRAEDTAVYYCAKSLGRFDYWGQGTLVTVSS

SEQ ID NO: 338 - protein, 116 aa, Homo sapiens
EVQLLESGGGLVQPGGSLRLSCAASGFTFRNFGMGWVRQAPGKGLEWVSWIEGGGTETYYADSVKGRFTISRDNSKNTLYLQMNSLRAEDTAVYYCAKSLGRFDYWGQGTLVTVSS

SEQ ID NO: 339 - protein, 116 aa, Homo sapiens
EVQLLESGGGLVQPGGSLRLSCAASGFTFRNFGMGWVRQAPGKGLEWVSWIISSGTETYYADSVKGRFTISRDNSKNTLYLQMNSLRAEDTAVYYCAKSLGRFDYWGQGTLVTVSG

SEQ ID NO: 340 - protein, 116 aa, Homo sapiens
EVQLLESGGGLVQPGGSLRLSCAASGFTFGDTMMGWVRQAPGKGLEWVSAIMHDGVHTYYADSVKGRFTISRDNSKNTLYLQMNSLRAEDTAVYYCAKSLGRFDYWGQGTLVTVSS

SEQ ID NO: 341 - protein, 116 aa, Homo sapiens
EVQLLESGGGLVQPGGSLRLSCAASGFTFGENGMGWVRQAPGKGLEWVSYIEDDGTHTYYADSVKGRFTISRDNSKNTLYLQMNSLRAEDTAVYYCAKSYGAFDYWGQGTLVTVSS

SEQ ID NO: 342 - protein, 116 aa, Homo sapiens
EVQLLESGGGLVQPGGSLRLSCAASGFTFEFAGMAWVRQAPGKGLEWVSSIDWDGGMTYYADSVKGRFTISRDNSKNTLYLQMNSLRAEDTAVYYCAKHEMDFDYWGQGTLVTVSS

SEQ ID NO: 343 - protein, 116 aa, Homo sapiens
  VARIANT 56: Xaa = Any Amino Acid
EVQLLESGGGLVQPGGSLRLSCAASGFTFPANGMGWVRQAPGKGLEWVSYIDSNGXLTYYADSVKGRFTISRDNSKNTLYLQMNSLRAEDTAVYYCAKSYGAFDYWGQGTLVTVSS

SEQ ID NO: 344 - protein, 116 aa, Homo sapiens
EVQLLESGGGLVQPGGSLRLSCAASGFTFDETGMGWVRQAPGKGLEWVSYIESHGMGTYYADSVKGRFTISRDNSKNTLYLQMNSLRAEDTAVYYCAKSYGAFDYWGQGTLVTVSS

SEQ ID NO: 345 - protein, 116 aa, Homo sapiens
  VARIANT 52: Xaa = Any Amino Acid
EVQLLESGGGLVQPGGSLRLSCAASGFTFFDHGMGWVRQAPGKGLEWVSYIXTPGGETYYADSVKGRFTISRDNSKNTLYLQMNSLRAEDTAVYYCAKSYGAFDYWGQGTLVTVSS

SEQ ID NO: 346 - protein, 116 aa, Homo sapiens
  VARIANT 98: Xaa = Any Amino Acid
EVQLLESGGGLVQPGGSLRLSCAASGFTFRDEPMAWVRQAPGKGLEWVSDISAEGETTYYADSVKGRFTISRDNSKNTLYLQMNSLRAEDTAVYYCAXTLGTFDYWGQGTLVTVSS

SEQ ID NO: 347 - protein, 116 aa, Homo sapiens
EVQLLESGGGLVQPGGSLRLSCAASGFTFGDHGMGWVRQAPGKGLEWVSYIGSTGGRTYYADSVKGRFTISRDNSKNTLYLQMNSLRAEDTAVYYCAKSYGAFDYWGQGTLVTVSS

SEQ ID NO: 348 - protein, 116 aa, Homo sapiens
EVQLLESGGGLVQPGGSLRLSCAASGFTFDDEMMSWVRQAPGKGLEWVSEITAGGVITYYADSVKGRFTISRDNSKNTLYLQMNSLRAEDTAVYYCATTGSDFDYWGQGTLVTVSS

SEQ ID NO: 349 - DNA, 324 bp, Homo sapiens
gacatccagatgacccagtctccatcctccctgtctgcatccgtaggagaccgtgtcaccatcacttgccgggcaagtcagccgattgggatttggttaaattggtaccagcagaaaccagggaaagcccctaagctcctgatctatgagatttccattttgcaaagtggggtcccatcacgtttcagtggcagtggatctgggacagatttcactctcaccatcagcagtctgcaacctgaagattttgctacgtactactgtcaacaggatctgactaatcctcgtacgttcggccaagggaccaaggtggaaatcaaacgg

SEQ ID NO: 350 - DNA, 324 bp, Homo sapiens
gacatccagatgacccagtctccatcctccctgtctgcatctgtaggagaccgtgtcaccatcacttgccgggcaagtcagtcgattgatctgtggttagcctggtatcagcagaaaccagggaaagcccctaggctcctgatctattattcttcccagttgcaaagtggggtcccatcacgtttcagtggcagtggatctgggacagatttcactctcaccatcagcagtctgcaacctgaagattttgctacgtactactgtcaacagctgtttattactcctttgacgttcggccaagggaccaaggtggaaatcaaacgg

SEQ ID NO: 351 - DNA, 324 bp, Homo sapiens
gacatccagatgacccagtctccatcctccctgtctgcatctgtaggagaccgtgtcaccatcacttgccgggcaagtcaggatatttgggagtatttagcgtggtaccagcagaaaccagggaaagcccctaagctcctgatctatgggagttccaggttgcaaagtggggtcccatcacgtttcagtggcagtggatctgggacagatttcactctcaccatcagcagtctgcaacctgaagattttgctacgtactactgtcagcaagattatgtttatcctcctacgttcggccaagggaccaaggtggaaatcaaacgg

SEQ ID NO: 352 - DNA, 324 bp, Homo sapiens
gacatccagatgacccagtctccatcctccctgtctgcatctgtaggagaccgtgtcaccatcacttgccgggcaagtcaggagattcatgagtttttaaattggtaccagcagaaaccagggaaagcccctaagctcctgatctatgaggtgtcccatttgcaaagtggggtcccatcacgtttcagtggcagtggatctgggacagatttcactctcaccatcagcagtctgcaacctgaagattttgctacgtactactgtcaacaggattttacggatccttttacgttcggccaagggaccaaggtggaaatcaaacgg

SEQ ID NO: 353 - DNA, 324 bp, Homo sapiens
gacatccagatgacccagtctccatcctccctgtctgcatctgtaggagaccgtgtcaccatcacttgccgggcaagtcaggggattactgattggttagcttggtatcagcagaaaccagggaaagccccgaagctcctgatctatggtagttcctggttgcaaagtggggtcccatcacgtttcagtggcagtggatctgggacagatttcactctcaccatcagcagtctgcaacctgaagattttgctacgtactactgtcaacagcttatgtctcctcctcttacgttcggccaagggaccaaggtggagatcaaacgg

SEQ ID NO: 354 - DNA, 324 bp, Homo sapiens
gacatccagatggcccagtctccatcctccctgtctgcatctgtaggagaccgtgtcaccatcacttgccgggcaagtcagcctatttatgattggttagcttggtaccagcagaaaccagggaaagcccctaagctcctgatctattcggcttccgagttgcaaagtggggtcccatcacgtttcagtggcagtggatctgggacagatttcactctcaccatcagcagtctgcaacctgaagattttgctacgtactactgtcaacagcttcagactaagcctctgacgttcggccaagggaccaaggtggaaatcaaacgg

SEQ ID NO: 355 - DNA, 324 bp, Homo sapiens
gacatccagatgacccagtctccatcctccctgtctacatctgtaggagaccgtgtcaccatcacttgccgggcaagtcaggatattggggattggttagcttggtaccagcagaaaccagggaaagcccctaagctcctgatctattataattcccatttgcaaagtggggtcccatcacgtttcagtggcagtggatctgggacagatttcactctcaccatcagcagtctgcaacctgaagattctgctacgtactactgtcaacagtatgctgatattcctatgacgttcggccaagggaccaaggtggagatcaaacgg

SEQ ID NO: 356 - DNA, 324 bp, Homo sapiens
gacatccagatgacccagtctccatcctccctgtctgcatctgtaggagaccgtgtcaccatcacttgccgggcaagtcagccgattgcgtattttttatcgtggtatcagcagaaaccagggaaagcccctaagctcctgatctataatgactccacgttgcaaagtggggtcccatcacgtttcagtggcagtggatctgggacagatttcactctcaccatcagcagtctgcaacctgaagattttgctacgtactactgtcaacaggatgcttttcatcctcctacgttcggccaagggaccaaggtggaaatcaagcgg

SEQ ID NO: 357 - DNA, 324 bp, Homo sapiens
gacatccagatgacccagtgtccatcctccctgtctgcatctgtaggagaccgtgtcaccatcacttgccgggcaagtcagccgattggggattggttaaattggtaccagcagaaaccagggaaagcccctaagctcctgatctatcatatttccaatttgcaaagtggggtcccatcacgtttcagtggcagtggatctgggacagatttcactctcaccatcagcagtctgcaacctgaagattttgctacgtactactgtcaacagctgcttcagtatcctctgacgttcggccaagggaccaaggtggaaatcaaacgg

SEQ ID NO: 358 - DNA, 324 bp, Homo sapiens
gacatccagatgacccagtctccatcctccctgtctgcatctgtaggagaccgtgtcaccatcacttgccgggcaagtcagaatattaatttttggttacggtggtaccagcagaaaccagggaaagcccctacgctcctgatctatgatgcttccgctttgcagagtggggtcccatcacgtttcagtggcagtggatctgggacagatttcactctcaccatcagcagtctgcaacctgaagattttgctacgtactactgtcaacaggattttaatcctccttatacgttcggccaagggaccaaggtggaaatcaaacgg

SEQ ID NO: 359 - DNA, 324 bp, Homo sapiens
gacatccagatgacccagtctccatcctccctgtctgcatctgtaggagaccgtgtcaccatcacttgccgggcaagtcagaatattaatttttggttacggtggtaccagcagaaaccagggaaagcccctacgctcctgatctatgatgcttcccgcagccagagtggggtcccatcacgtttcagtggcagtggatctgggacagatttcactctcaccatcagcagtctgcaacctgaagattttgctacgtactactgtcaacaggattttaatcctccttatacgttcggccaagggaccaaggtggaaatcaaacgg

SEQ ID NO: 360 - DNA, 324 bp, Homo sapiens
gacatccagatgacccagtctccatcctccctgtctgcatctgtaggagaccgtgtcaccatcacttgccgggcaagtcagaatattaatttttggttacggtggtaccagcagaaaccagggaaagcccctacgctcctgatctatgatgcttccgctttgcagagtggggtcccatcacgtttcagtggcagtggatctgggacagatttcactctcaccatcagcagtctgcaacctgaagattttgctacgtactactgtcaacaggatttaatgcctccttatacgttcggccaagggaccaaggtggaaatcaaacgg

SEQ ID NO: 361 - DNA, 324 bp, Homo sapiens
gacatccagatgacccagtctccatcctccctgtctgcatctgtaggagaccgtgtcaccatcacttgccgggcaagtcagaatattaatttttggttacggtggtaccagcagaaaccagggaaagcccctacgctcctgatctatgatgcttcccgcagccagagtggggtcccatcacgtttcagtggcagtggatctgggacagatttcactctcaccatcagcagtctgcaacctgaagattttgctacgtactactgtcaacaggatttaatgcctccttatacgttcggccaagggaccaaggtggaaatcaaacgg

SEQ ID NO: 362 - DNA, 324 bp, Homo sapiens
gacatccagatgacccagtctccatcctccctgtctgcatctgtaggagaccgtgtcaccatcacttgccacgcgagccagaatattaatttttggttacggtggtaccagcagaaaccagggaaagcccctacgctcctgatctatgatgcttccgctttgcagagtggggtcccatcacgtttcagtggcagtggatctgggacagatttcactctcaccatcagcagtctgcaacctgaagattttgctacgtactactgtcaacaggattttaatcctccttatacgttcggccaagggaccaaggtggaaatcaaacgg

SEQ ID NO: 363 - DNA, 324 bp, Homo sapiens
gacatccagatgacccagtttccatcctccctgtctgcatctgtaggagaccgtgtcaccatcacttgcaccaccgaccagaatattaatttttggttacggtggtaccagcagaaaccagggaaagcccctacgctcctgatctatgatgcttccgctttgcagagtggggtcccatcacgtttcagtggcagtggatctgggacagatttcactctcaccatcagcagtctgcaacctgaagattttgctacgtactactgtcaacaggattttaatcctccttatacgttcggccaagggaccaaggtggaaatcaaacgg

SEQ ID NO: 364 - DNA, 324 bp, Homo sapiens
gacatccagatgacccagtccccatcctccctgtctgcatctgtaggagaccgtgtcaccatcacttgcgcggccagccagaatactaatttttggttacggtggtaccagcagaaaccagggaaagcccctacgctcctgatctatgatgcttccgctttgcagagtggggtcccatcacgtttcagtggcagtggatctgggacagatttcactctcaccatcagcagtctgcaacctgaagattttgctacgtactactgtcaacaggattttaatcctccttatacgttcggccaagggaccaaggtggaaatcaaacgg

SEQ ID NO: 365 - DNA, 324 bp, Homo sapiens
gacatccagatgacccagtccccatcctccctgtctgcatctgtaggagaccgtgtcaccatcacttgcaacaccacccagaatattaatttttggttacggtggtaccagcagaaaccagggaaagcccctacgctcctgatctatgatgcttccgctttgcagagtggggtcccatcacgtttcagtggcagtggatctgggacagatttcactctcaccatcagcagtctgcaacctgaagattctgctacgtactactgtcaacaggattttaatcctccttatacgttcggccaagggaccaaggtggaaatcaaacgg

SEQ ID NO: 366 - DNA, 324 bp, Homo sapiens
gacatccagatgacccagtctccatcctccctgtctgcatctgtaggagaccgtgtcaccatcacttgccgggcaagtcagaatattaatttttggttacggtggtaccagcagaaaccagggaaagcccctacgctcctgatctatgatgcttccgctcccaacaacggggtcccatcacgtttcagtggcagtggatctgggacagatttcactctcaccatcagcagtctgcaacctgaagattttgctacgtactactgtcaacaggattttaatcctccttatacgttcggccaagggaccaaggtggaaatcaaacgg

SEQ ID NO: 367 - DNA, 324 bp, Homo sapiens
gacatccagatgacccagtccccatcctccctgtctgcatctgtaggagaccgtgtcaccatcacttgccgggcaagtcagaatattaatttttggttacggtggtaccagcagaaaccagggaaagcccctacgctcctgatctatgatgcttcccagccccagagtggggtcccatcacgtttcagtggcagtggatctgggacagatttcactctcaccatcagcagtctgcaacctgaagattttgctacgtactactgtcaacaggattttaatcctccttatacgttcggccaagggaccaaggtggaaatcaaacgg

SEQ ID NO: 368 - DNA, 324 bp, Homo sapiens
gacatccagatgacccagtctccatcctccctgtctgcatctgtaggagaccgtgtcaccatcacttgccgggcaagtcagaatattaatttttggttacggtggtaccagcagaaaccagggaaagcccctacgctcctgatctatgatgcttccgctttgcagagtggggtcccatcacgtttcagtggcagtggatctgggacagatttcactctcaccatcagcagtctgcaacctgaagattttgctacgtactactgtcaacaggattttatgaaccctttcacgttcggccaagggaccaaggtggaaataaacggg

SEQ ID NO: 369 - DNA, 324 bp, Homo sapiens
gacatccagatgacccagtctccatcctccctgtctgcatctgtaggagaccgtgtcaccatcacttgccgggcaagtcagaatattaatttttggttacggtggtaccagcagaaaccagggaaagcccctacgctcctgatctatgatgcttccgctttgcagagtggggtcccatcacgtttcagtggcagtggatctgggacagatttcactctcaccatcagcagtctgcaacctgaagattttgctacgtactactgtcaacaggattttcacttgcctttcacgttcggccaagggaccaaggtggagatcaaacgg

SEQ ID NO: 370 - DNA, 324 bp, Homo sapiens
gacatccagatgacccagtctccatcctccctgtctgcatctgtaggagaccgtgtcaccatcacttgccgggcaagtcagaatattaatttttggttacggtggtaccagcagaaaccagggaaagcccctacgctcctgatctatgatgcttccgctttgcagagtggggtcccatcacgtttcagtggcagtggatctgggacagatttcactctcaccatcagcagtctgcaacctgaagattttgctacgtactactgtcaacaggattttatgttccctctgacgttcggccaagggaccaaggtggaaatcaaacgg

SEQ ID NO: 371 - DNA, 324 bp, Homo sapiens
gacatccagatgacccagtctccatcctccctgtctgcatctgtaggagaccgtgtcaccatcacttgccgggcaagtcagaatattaatttttggttacggtggtaccagcagaaaccagggaaagcccctacgctcctgatctatgatgcttccgctttgcagagtggggtcccatcacgtttcagtggcagtggatctgggacagatttcactctcaccatcagcagtctgcaacctgaagattttgctacgtactactgtcaacaggatttttcgcagcctttcacgttcggccaagggaccaaggtggaaatcaaacgg

SEQ ID NO: 372 - DNA, 324 bp, Homo sapiens
gacatccagatgacccagtcaccatcctccctgtctgcatctgtaggagaccgtgtcaccatcacttgccgggcaagtcagagtattaatttttggttacggtggtaccagcagaaaccagggaaagcccctacgcttctgatctatgatgcttcccgcacgcagagtggggtcccatcacgtttcagtggcagtggatctgggacagatttcactctcaccattagcagtctgcaacctgaagattttgctacgtactactgtcaacaggattttaatcctccttatacgttcggccaagggaccaaggtggaaatcaaacgg

SEQ ID NO: 373 - DNA, 323 bp, Homo sapiens
gacatccagatgacccagtctccatcctccctgtctgcatctgtaggaaaccgtgtcaccatcacttgccgggcaagtcagaatattaatttttggttacggtggtaccagcagaaaccagggaaagcccctacgctcctgatctatgatgcttcccgcagccagagtggggtcccatcaaggttcagtggcagtggatctgggacagatttcactctcaccatcagcagtctgcaacctgaagattttgctacgtactactgtcaacaggattttatgaaccctttcacgttcggccaagggaccaaggtggaaataaacgg

SEQ ID NO: 374 - DNA, 324 bp, Homo sapiens
gacatccagatgacccagtctccatcctccctgtctgcatctgtaggagaccgtgtcaccatcacttgccgggcaagtcagaatattaatttttggttacggtggtaccagcagaaaccagggaaagcccctacgctcctgatctatgatgcttcccgcagccagagtggggtcccatcaaggttcagtggcagtggatctgggacagatttcactctcaccatcagcagtctgcaacctgaagattttgctacgtactactgtcaacaggattttcacttgcctttcacgttcggccaagggaccaaggtggagatcaaacgg

SEQ ID NO: 375 - DNA, 324 bp, Homo sapiens
gacatccagatgacccagtctccatcctccctgtctgcatctgtaggagaccgtgtcaccatcacttgccgggcaagtcagaatattaatttttggttacggtggtaccagcagaaaccagggaaagcccctacgctcctgatctatgatgcttcccgcagccagagtggggtcccatcaaggttcagtggcagtggatctgggacagatttcactctcaccatcagcagtctgcaacctgaagattttgctacgtactactgtcaacaggattttatgttccctctgacgttcggccaagggaccaaggtggaaatcaaacgg

SEQ ID NO: 376 - DNA, 324 bp, Homo sapiens
gacatccagatgacccagtctccatcctccctgtctgcatctgtaggagaccgtgtcaccatcacttgccgggcaagtcagaatattaatttttggttacggtggtaccagcagaaaccagggaaagcccctacgctcctgatctatgatgcttcccgcagccagagtggggtcccatcaaggttcagtggcagtggatctgggacagatttcactctcaccatcagcagtctgcaacctgaagattttgctacgtactactgtcaacaggatttttcgcagcctttcacgttcggccaagggaccaaggtggaaatcaaacgg

SEQ ID NO: 377 - DNA, 324 bp, Homo sapiens
gacatccagatgacccagtctccatcctccctgtctgcatctgtaggagaccgtgtcaccatcacttgccgggcaagtcagaatattaatttttggttacggtggtaccagcagaaaccagggaaagcccctacgctcctgatctatgatgcttcccgcagccagagtggggtcccatcaaggttcagtggcagtggatctgggacagatttcactctcaccatcagcagtctgcaacctgaagattttgctacgtactactgtcaacaggatttaatgcctccttatacgttcggccaagggaccaaggtggaaatcaaacgg

SEQ ID NO: 378 - DNA, 324 bp, Homo sapiens
gacatccagatgacccagtccccatcctccctgtctgcatctgtaggagaccgtgtcaccatcacttgccgggcaagtcagaatattaatttttggttacggtggtaccagcagaaaccagggaaagcccctacgcttctgatctatgatgcttccaggacccagagtggggtcccatcaaggttcagtggcagtggatctgggacagatttcactctcaccatcagcagtctgcaacctgaagattttgctacgtactactgtcaacaggatttaatgcctccttatacgttcggccaagggaccaaggtggaaatcaaacgg

SEQ ID NO: 379 - DNA, 324 bp, Homo sapiens
gacatccagatgacccagtctccatcctccctgtctgcatctgtaggagaccgtgtcaccatcacttgccgggcaagtcagaatattaatttttggttacggtggtaccagcagaaaccagggaaagcccctacgctcctgatctatgatgcttccgctcccaacaacggggccccatcaaggttcagtggcagtggatctgggacagatttcactctcaccatcagcagtctgcaacctgaagattttgctacgtactactgtcaacaggattttcacttgcctttcacgttcggccaagggaccaaggtggagatcaaacgg

SEQ ID NO: 380 - DNA, 324 bp, Homo sapiens
gacatccagatgacccagtctccatcctccctgtctgcatctgtaggagaccgtgtcaccatcacttgccgggcaagtcagaatattaatttttggttacggtggtaccagcagaaaccagggaaagcccctacgctcctgatctatgatgcttccgctcccaacaacggggtcccatcaaggttcagtggcagtggatctgggacagatttcactctcaccatcagcagtctgcaacctgaagattttgctacgtactactgtcaacaggattttatgttccctctgacgttcggccaagggaccaaggtggaaatcaaacgg

SEQ ID NO: 381 - DNA, 324 bp, Homo sapiens
gacatccagatgacccagtctccatcctccctgtctgcatctgtaggagaccgtgtcaccatcacttgccgggcaagtcagaatattaatttttggttacggtggtaccagcagaaaccagggaaagcccctacgctcctgatctatgatgcttccgctcccaacaacggggtcccatcaaggttcagtggcagtggatctgggacagatttcactctcaccatcagcagtctgcaacctgaagattttgctacgtactactgtcaacaggatttttcgcagcctttcacgttcggccaagggaccaaggtggaaatcaaacgg

SEQ ID NO: 382 - DNA, 324 bp, Homo sapiens
gacatccagatgacccagtctccatcctccctgtctgcatctgtaggagaccgtgtcaccatcacttgccgggcaagtcagaatattaatttttggttacggtggtaccagcagaaaccagggaaagcccctacgctcctgatctatgatgcttccgctcccaacaacggggtcccatcaaggttcagtggcagtggatctgggacagatttcactctcaccatcagcagtctgcaacctgaagattttgctacgtactactgtcaacaggatttaatgcctccttatacgttcggccaagggaccaaggtggaaatcaaacgg

SEQ ID NO: 383 - DNA, 323 bp, Homo sapiens
gacatccagatgacccagtccccatcctccctgtctgcatctgtaggagaccgtgtcaccatcacttgccgggcaagtcagaatattaatttttggttacggtggtaccagcagaaaccagggaaagcccctacgcttctgatctatgatgcttccaggacccagagtggggtcccatcaaggttcagtggcagtggatctgggacagatttcactctcaccatcagcagtctgcaacctgaagattttgctacgtactactgtcaacaggattttatgaaccctttcacgttcggccaagggaccaaggtggaaataaacgg

SEQ ID NO: 384 - DNA, 324 bp, Homo sapiens
gacatccagatgacccagtccccatcctccctgtctgcatctgtaggagaccgtgtcaccatcacttgccgggcaagtcagaatattaatttttggttacggtggtaccagcagaaaccagggaaagcccctacgcttctgatctatgatgcttccaggacccagagtggggtcccatcaaggttcagtggcagtgggtctgggacagatttcactctcaccatcagcagtctgcaacctgaagattttgctacgtactactgtcaacaggattttcacttgcctttcacgttcggccaagggaccaaggtggagatcaaacgg

SEQ ID NO: 385 - DNA, 324 bp, Homo sapiens
gacatccagatgacccagtccccatcctccctgtctgcatctgtaggagaccgtgtcaccatcacttgccgggcaagtcagaatattaatttttggttacggtggtaccagcagaaaccagggaaagcccctacgcttctgatctatgatgcttccaggacccagagtggggtcccatcaaggttcagtggcagtggatctgggacagatttcactctcaccatcagcagtctgcaacctgaagattttgctacgtactactgtcaacaggattttatgttccctctgacgttcggccaagggaccaaggtggaaatcaaacgg

SEQ ID NO: 386 - DNA, 324 bp, Homo sapiens
gacatccagatgacccagtccccatcctccctgtctgcatctgtaggagaccgtgtcaccatcacttgccgggcaagtcagaatattaatttttggttacggtggtaccagcagaaaccagggaaagcccctacgcttctgatctatgatgcttccaggacccagagtggggtcccatcaaggttcagtggcagtggatctgggacagatttcactctcaccatcagcagtctgcaacctgaagattttgctacgtactactgtcaacaggatttttcgcagcctttcacgttcggccaaggggccaaggtggaaatcaaacgg

SEQ ID NO: 387 - DNA, 323 bp, Homo sapiens
gacatccagatgacccagtctccatcctccctgtctgcatctgtaggagaccgtgtcaccatcacttgccgggcaagtcagaatattaatttttggttacggtggtaccagcagaaaccagggaaagcccctacgctcctgatctatgatgcttccgctcccaacaacggggtcccatcaaggttcagtggcagtggatctgggacagatttcactctcaccatcagcagtctgcaacctgaagattttgctacgtactactgtcaacaggattttatgaaccctttcacgttcggccaagggaccaaggtggaaataaacgg

SEQ ID NO: 388 - DNA, 323 bp, Homo sapiens
gacatccagatgacccagtccccatcctccctgtctgcatctgtaggagaccgtgtcaccatcacttgccgggcaagtcagaatattaatttttggttacggtggtaccagcagaaaccagggaaagcccctacgctcctgatctatgatgcttcccagccccagagtggggtcccatcaaggttcagtggcagtggatctgggacagatttcactctcaccatcagcagtctgcaacctgaagattttgctacgtactactgtcaacaggattttatgaaccctttcacgttcggccaagggaccaaggtggaaataaacgg

SEQ ID NO: 389 - DNA, 324 bp, Homo sapiens
gacatccagatgacccagtccccatcctccctgtctgcatctgtaggagaccgtgtcaccatcacttgccgggcaagtcagaatattaatttttggttacggtggtaccagcagaaaccagggaaagcccctacgctcctgatctatgatgcttcccagccccagagtggggacccatcaaggttcagtggcagtggatctgggacagatttcactctcaccatcagcagtctgcaacctgaagattttgctacgtactactgtcaacaggattttcacttgcctttcacgttcggccaagggaccaaggtggagatcaaacgg

SEQ ID NO: 390 - DNA, 324 bp, Homo sapiens
gacatccagatgacccagtccccatcctccctgtctgcatctgtaggagaccgtgtcaccatcacttgccgggcaagtcagaatattaatttttggttacggtggtaccagcagaaaccagggaaagcccctacgctcctgatctatgatgcttcccagccccagagtggggtcccatcaaggttcagtggcagtggatctgggacagatttcactctcaccatcagcagtctgcaacctgaagattttgctacgtactactgtcaacaggattttatgttccctctgacgttcggccaagggaccaaggtggaaatcaaacgg

SEQ ID NO: 391 - DNA, 324 bp, Homo sapiens
gacatccagatgacccagtccccatcctccctgtctgcatctgtaggagaccgtgtcaccatcacttgccgggcaagtcagaatattaatttttggttacggtggtaccagcagaaaccagggaaagcccctacgctcctgatctatgatgcttcccagccccagagtggggtcccatcaaggttcagtggcagtggatctgggacagatttcactctcaccatcagcagtctgcaacctgaagattttgctacgtactactgtcaacaggatttttcgcagcctttcacgttcggccaagggaccaaggtggaaatcaaacgg

SEQ ID NO: 392 - DNA, 324 bp, Homo sapiens
gacatccagatgacccagtccccatcctccctgtctgcatctgtaggagaccgtgtcaccatcacttgccgggcaagtcagaatattaatttttggttacggtggtaccagcagaaaccagggaaagcccctacgctcctgatctatgatgcttcccagccccagagtggggtcccatcaaggttcagtggcagtggatctgggacagatttcactctcaccatcagcagtctgcaacctgaagattttgctacgtactactgtcaacaggatttaatgcctccttatacgttcggccaagggaccaaggtggaaatcaaacgg

SEQ ID NO: 393 - DNA, 323 bp, Homo sapiens
gacatccagatgacccagtcaccatcctccctgtctgcatctgtaggagaccgtgtcaccatcacttgccgggcaagtcagagtattaatttttggttacggtggtaccagcagaaaccagggaaagcccctacgcttctgatctatgatgcttcccgcacgcagagtggggtcccatcaaggttcagtggcagtgggtctgggacagatttcactctcaccatcagcagtctgcaacctgaagattttgctacgtactactgtcaacaggattttatgaaccctttcacgttcggccaagggaccaaggtggaaataaacgg

SEQ ID NO: 394 - DNA, 324 bp, Homo sapiens
gacatccagatgacccagtcaccatcctccctgtctgcatctgtaggagaccgtgtcaccatcacttgccgggcaagtcagagtattaatttttggttacggtggtaccagcagaaaccagggaaagcccctacgcttctgatctatgatgcttcccgcacgcagagtggggtcccatcaaggttcagtggcagtggatctgggacagatttcactctcaccatcagcagtctgcaacctgaagattttgctacgtactactgtcaacaggattttcacttgcctttcacgttcggccaagggaccaaggtggagatcaaacgg

SEQ ID NO: 395 - DNA, 324 bp, Homo sapiens
gacatccagatgacccagtcaccatcctccctgtctgcatctgtaggagaccgtgtcaccatcacttgccgggcaagtcagagtattaatttttggttacggtggtaccagcagaaaccagggaaagcccctacgcttctgatctatgatgcttcccgcacgcagagtggggtcccatcaaggttcagtggcagtggatctgggacagatttcactctcaccatcagcagtctgcaacctgaagattttgctacgtactactgtcaacaggattttatgttccctctgacgttcggccaagggaccaaggtggaaatcaaacgg

SEQ ID NO: 396 - DNA, 324 bp, Homo sapiens
gacatccagatgacccagtcaccatcctccctgtctgcatctgtaggagaccgtgtcaccatcacttgccgggcaagtcagagtattaatttttggttacggtggtaccagcagaaaccagggaaagcccctacgcttctgatctatgatgcttcccgcacgcagagtggggtcccatcaaggttcagtggcagtggatctgggacagatttcactctcaccatcagcagtctgcaacctgaagattttgctacgtactactgtcaacaggatttttcgcagcctttcacgttcggccaagggaccaaggtggaaatcaaacgg

SEQ ID NO: 397 - DNA, 324 bp, Homo sapiens
gacatccagatgacccagtcaccatcctccctgtctgcatctgtaggagaccgtgtcaccatcacttgccgggcaagtcagagtattaatttttggttacggtggtaccagcagaaaccagggaaagcccctacgcttctgatctatgatgcttcccgcacgcagagtggggtcccatcaaggttcagtggcagtggatctgggacagatttcactctcaccatcagcagtctgcaacctgaagattttgctacgtactactgtcaacaggatttaatgcctccttatacgttcggccaagggaccaaggtggaaatcaaacgg

SEQ ID NO: 398 - DNA, 324 bp, Homo sapiens
gacatccagatgacccagtctccatcctccctgtctgcatctgtaggagaccgtgtcaccatcacttgccacgcgagccagaatattaatttttggttacggtggtatcagcagaaaccagggaaagcccctacgctcctgatctatgatgcttcccgcagccagagtggggtcccatcacgtttcagtggcagtggatctgggacagatttcactctcaccatcagcagtctgcaacctgaagattttgctacgtactactgtcaacaggatttaatgcctccttatacgttcggccaagggaccaaggtggaaatcaaacgg

SEQ ID NO: 399 - DNA, 324 bp, Homo sapiens
gacatccagatgacccagtttccatcctccctgtctgcatctgtaggagaccgtgtcaccatcacttgcaccaccgaccagaatattaatttttggttacggtggtatcagcagaaaccagggaaagcccctacgctcctgatctatgatgcttcccgcagccagagtggggtcccatcacgtttcagtggcagtggatctgggacagatttcactctcaccatcagcagtctgcaacctgaagattttgctacgtactactgtcaacaggatttaatgcctccttatacgttcggccaagggaccaaggtggaaatcaaacgg

SEQ ID NO: 400 - DNA, 324 bp, Homo sapiens
gacatccagatgacccagtccccatcctccctgtctgcatctgtaggagaccgtgtcaccatcacttgcgcggccagccagaatactaatttttggttacggtggtaccagcagaaaccagggaaagcccctacgctcctgatctatgatgcttcccgcagccagagtggggtcccatcacgtttcagtggcagtggatctgggacagatttcactctcaccatcagcagtctgcaacctgaagattttgctacgtactactgtcaacaggatttaatgcctccttatacgttcggccaagggaccaaggtggaaatcaaacgg

SEQ ID NO: 401 - DNA, 324 bp, Homo sapiens
gacatccagatgacccagtccccatcctccctgtctgcatctgtaggagaccgtgtcaccatcacttgcaacaccacccagaatattaatttttggttacggtggtaccagcagaaaccagggaaagcccctaagctcctgatctatgatgcttcccgcagccagagtggggtcccatcacgtttcagtggcagtggatctgggacagatttcactctcaccatcagcagtctgcaacctgaagattttgctacgtactactgtcaacaggatttaatgcctccttatacgttcggccaagggaccaaggtggaaatcaaacgg

SEQ ID NO: 402 - DNA, 324 bp, Homo sapiens
gacatccagatgacccagtctccatcctccctgtctgcatctgtaggagaccgtgtcaccatcacttgccgggcaagtacctcgatcaatttttggttacggtggtaccagcagaaaccagggaaagcccctacgctcctgatctatgatgcttcccgcagccagagtggggtcccatcacgtttcagtggcagtggatctgggacagatttcactctcaccatcagcagtctgcaacctgaagattttgctacgtactactgtcaacaggatttaatgcctccttatacgttcggccaagggaccaaggtggaaatcaaacgg

SEQ ID NO: 403 - DNA, 324 bp, Homo sapiens
gacatccagatgacccagtctccatcctccctgtctgcatctgtaggagaccgtgtcaccatcacttgccgggcaagtctccccctcaatttttggttacggtggtaccagcagaaaccagggaaagcccctacgctcctgatctatgatgcttcccgcagccagagtggggtcccatcacgtttcagtggcagtggatctgggacagatttcactctcaccatcagcagtctgcaacctgaagattttgctacatactactgtcaacaggatttaatgcctccttatacgttcggccacgggaccaaggtggaaatcaaacgg

SEQ ID NO: 404 - DNA, 324 bp, Homo sapiens
gacatccagatgacccagtctccatcctccctgtctgcatctgtaggagaccgtgtcaccatcacttgcttcctgtcgcagaatattaatttttggttacggtggtaccagcagaaaccagggaaagcccctacgctcctgatctatgatgcttcccgcagccagagtggggtcccatcacgtttcagtggcagtggatctgggacagatttcactctcaccatcagcagtctgcaacctgaagattttgctacgtactactgtcaacaggatttaatgcctccttatacgttcggccaagggaccaaggtggaaatcaaacgg

SEQ ID NO: 405 - DNA, 324 bp, Homo sapiens
gacatccagatgacccagtctccatcctccctgtctgcatctgtaggagaccgtgtcaccatcacttgcaccaccacccagaatattaatttttggttacggtggtaccagcagaaaccagggaaagcccctacgctcctgatctatgatgcttcccgcagccagagtggggtcccatcacgtttcagtggcagtggatctgggacagatttcactctcaccatcagcagtctgcaacctgaagattttgctacgtactactgtcaacaggatttaatgcctccttatacgttcggccaagggaccaaggtggaaatcaaacgg

SEQ ID NO: 406 - DNA, 324 bp, Homo sapiens
gacatccagatgacccagtctccatcctccctgtctgcatctgtaggagaccgtgtcaccatcacttgccggcccaaccagaatattaatttttggttacggtggtaccagcagaaaccagggaaagcccctacgctcctgatctatgatgcttcccgcagccagagtggggtcccatcacgtttcagtggcagtggatctgggacagatttcactctcaccatcagcagtctgcaacctgaagattttgctacgtactactgtcaacaggatttaatgcctccttatacgttcggccaagggaccaaggtggaaatcaaacgg

SEQ ID NO: 407 - DNA, 324 bp, Homo sapiens
gacatccagatgacccagtctccatcctccctgtctgcatctgtaggagaccgtgtcaccatcacttgccacaccacccagaatattaatttttggttacggtggtaccagcagaaaccagggaaagcccctacgctcctgatctatgatgcttcccgcagccagagtggggtcccatcgcgtttcagtggcagtggatctgggacagatttcactctcaccatcagcagtctgcaacctgaagattttgctacgtactactgtcaacaggatttaatgcctccttatacgttcggccaagggaccaaggtggaaatcaaacgg

SEQ ID NO: 408 - DNA, 324 bp, Homo sapiens
gacatccagatgacccagtctccatcctccctgtctgcatctgtaggagaccgtgtcaccatcacttgcgtgtgggggcagaatattaatttttggttacggtggtaccagcagaaaccagggaaagcccctacgctcctgatctatgatgcttcccgcagccagagtggggtcccatcacgtttcagtggcagtggatctgggacagatttcactctcaccatcagcagtctgcaacctgaagattttgctacgtactactgtcaacaggatttaatgcctccttatacgttcggccaagggaccaaggtggaaatcaaacgg

SEQ ID NO: 409 - DNA, 324 bp, Homo sapiens
gacatccagatgacccagtctccatcctccctgtctgcatctgtaggagaccgtgtcaccatcacttgccacagcacgcagaatattaatttttggttacggtggtaccagcagaaaccagggaaagcccctacgctcctgatctatgatgcttcccgcagccagagtggggtcccatcacgtttcagtggcagtggatctgggacagatttcactctcaccatcagcagtctgcaacctgaagattttgctacgtactactgtcaacaggatttaatgcctccttatacgttcggccaagggaccaaggtggaaatcaaacgg

SEQ ID NO: 410 - DNA, 324 bp, Homo sapiens
gacatccagatgacccagtctccatcctccctgtctgcatctgtaggagaccgtgtcaccatcacttgccgggcaagtacccccacgaatttttggttacggtggtaccggcagaaaccagggaaagcccctacgctcctgatctatgatgcttcccgcagccagagtggggtcccatcacgtttcagtggcagtggatctgggacagatttcactctcaccatcagcagtctgcaacctgaagattttgctacgtactactgtcaacaggatttaatgcctccttatacgttcggccaagggaccaaggtggaaatcaaacgg

SEQ ID NO: 411 - DNA, 324 bp, Homo sapiens
gacatccagatgacccagtccccatcctccctgtctgcatctgtaggagaccgtgtcaccatcacttgcaacatcaaccagaatattaatttttggttacggtggtaccagcagaaaccagggaaagcccctacgctcctgatctatgatgcttcccgcagccagagtggggtcccatcacgttttagtggcagtggatctgggacagatttcactctcaccatcagcagtctgcaacctgaagattttgctacgtactactgtcaacaggatttaatgcctccttatacgttcggccaagggaccaaggtggaaatcaaacgg

SEQ ID NO: 412 - DNA, 324 bp, Homo sapiens
gacatccagatgacccagtctccatcctccctgtctgcatctgtaggagaccgtgttaccatcacttgccgcccgacccagaatattaatttttggttacggtggtaccagcagaaaccagggaaagcccctacgctcctgatctatgatgcttcccgcagccagagtggggtcccatcacgtttcagtggcagtggatctgggacagatttcactctcaccatcagcagtctgcaacctgaagattttgctacgtactactgtcaacaggatttaatgcctccttatacgttcggccaagggaccaaggtggaaatcaaacgg

SEQ ID NO: 413 - DNA, 324 bp, Homo sapiens
gacatccagatgacccagtctccatcctccctgtctgcatctgtaggagaccgtgtcaccatcacttgccgggcaagtctctccatcaatttttggttacggtggtaccagcagaaaccagggaaagcccctacgctcctgatctatgatgcttcccgcagccagagtggggtcccatcacgtttcagtggcagtggatctgggacagatttcactctcaccatcagcagtctgcaacctgaagattttgctacgtactactgtcaacaggatttaatgcctccttatacgttcggccaagggaccaaggtggaaatcaaacgg

SEQ ID NO: 414 - DNA, 324 bp, Homo sapiens
gacatccagatgacccagtctccatcctccctgtctgcatctgtaggagaccgtgtcaccatcacttgccgggcaagttccttgctcaatttttggttacggtggtaccagcagaaaccagggaaagcccctacgctcctgatctatgatgcttcccgcagccagagtggggtcccatcacgtttcagtggcagtggatctgggacagatttcactctcaccatcagcagtctgcaacctgaagattttgctacgtactactgtcaacaggatttaatgcctccttatacgttcggccaagggaccaaggtggaaatcaaacgg

SEQ ID NO: 415 - DNA, 324 bp, Homo sapiens
  misc_feature 276, 279: n = A,T,C or G
gacatccagatgacccagtctccatcctccctgtctgcatctgtaggagaccgtgtcaccatcacttgccgggcaagtggggagttgaatttttggttacggtggtaccagcagaaaccagggaaagcccctacgctcctgatctatgatgcttcccgcagccagagtggggtcccatcacgtttcagtggcagtggatctgggacagatttcactctcaccatcagcagtctgcaacctgaagattttgctacgtactactgtcaacaggatctnatngtcccttttacgttcggccaagggaccaaggtggaaatcaaacgg

SEQ ID NO: 416 - DNA, 324 bp, Homo sapiens
gacatccagatgacccagtctccatcctccctgtctgcatctgtaggagaccgtgtcaccatcacttgcaacaccaaccagaatattaatttttggttacggtggtaccagcagaaaccagggaaagcccctacgctcctgatctatgatgcttcccgcagccagagtggggtcccatcacgtttcagtggcagtggatctgggacagatttcactctcaccatcagcagtctgcaacctgaagattttgctacgtactactgtcaacaggatttaatgcctccttatacgttcggccaagggaccaaggtggaaatcaaacgg

SEQ ID NO: 417 - DNA, 324 bp, Homo sapiens
gacatccagatgacccagtctccatcctccctgtctgcatctgtaggagaccgtgtcaccatcacttgccgggcaagtaagtccgtcaatttttggttacggtggtaccagcagaaaccagggaaagcccctacgctcctgatctatgatgcttcccgcagccagagtggggtcccatcacgtttcagtggcagtggatctgggacagatttcactctcaccatcagcagtctgcaacctgaagattttgctacgtactactgtcaacaggatttaatgcctccttatacgttcggccaagggaccaaggtggaaatcaaacgg

SEQ ID NO: 418 - DNA, 324 bp, Homo sapiens; identical to SEQ ID NO: 412

SEQ ID NO: 419 - DNA, 324 bp, Homo sapiens
gacatccagatgacccagtctccatcctccctgtctgcatctgtaggagaccgtgtcaccatcacttgcaacaccaagcagaatattaatttttggttacggtggtaccagcagaaaccagggaaagcccctacgctcctgatcgatgatgcttcccgcagccagagcggggtcccatcacgtttcagtggcagtggatctgggacagatttcactctcaccatcagcagtctgcaacccgaagattttgctacgtactactgtcaacaggatttagtgcctccttatacgttcggccaagggaccaaggtggaaatcaaacgg

SEQ ID NO: 420 - DNA, 324 bp, Homo sapiens
gacatccagatgacccagtctccatcctccctgtctgcatctgtaggagaccgtgtcaccatcacttgcttcctgtcgcagaatattaatttttggttacggtggtaccagcagaaaccaggtaaagcccctacgctcctgatctatgatgcttcccgcagccagagtggggtcccatcacgtttcagtggcagtggatctgggacagatttcactctcaccatcagcagtctgcaacctgaagattttgctacgtactactgtcaacaggatttaatgcctccttatacgttcggccaagggaccaaggtggaaatcaaacgg

SEQ ID NO: 421 - DNA, 324 bp, Homo sapiens
gacatccagatgacccagtctccatcctccctgtctgcatctgtaggagaccgtgtcaccatcacttgccggacggggcagaatattaatttttggttacggtggtaccagcagaaaccagggaaagcccctacgctcctgatcgatgatgcttcccgcagccagagtggggtcccatcacgtttcagtggcagtggatctgggacagatttcactctcaccatcagcagtctgcaacctgaagattttgctacgtactactgtcaacaggatttaatgcctccttatacgttcggccaagggaccaaggtggaaatcaaacgg

SEQ ID NO: 422 - DNA, 324 bp, Homo sapiens
gacatccagatgacccagtctccatcctccctgtctgcatctgtaggagaccgtgtcaccatcacttgccgggcaagttggtccatcaatttttggttacggtggtaccagcagaaaccagggaaagcccctacgctcctgatctatgatgcttcccgcagccagagtggggtcccatcacgtttcagtggcagtggatctgggacagatttcactctcaccatcagcagtctgcaacctgaagattttgctacgtactactgtcaacaggatttaatgcctccttatacgttcggccaagggaccaaggtggaaatcaaacgg

SEQ ID NO: 423 - DNA, 324 bp, Homo sapiens
gacatccagatgacccagtctccatcctccctgtctgcatctgtaggagaccgtgtcaccatcacttgccgggcaagttccccgctcaatttttggttacggtggtaccagcagaaaccagggaaagcccctacgctcctgatctatgatgcttcccgcagccagagtggggtcccatcacgtttcagtggcagtggatctgggacagatttcactctcaccatcaacagtctgcaacctgaagattttgctacgtactactgtcaacaggatttaatgcctccttatacgttcggccaagggaccaaggtggaaatcaaacgg

SEQ ID NO: 424 - DNA, 324 bp, Homo sapiens
gacatccagatgacccagtctccatcctccctgtctgcatctgtaggagaccgtgtcaccatcacttgccggacaagttcccccatcaatttttggttacggtggtaccagcagaaaccagggaaagcccctacgctcctgatctatgatgcttcccgcagccagagtggggtcccatcacgtttcagtggcagtggatctgggacagatttcactctcaccatcagcagtctgcaacctgaagattttgctacgtactactgtcaacaggatttaatgcctccttatacgttcggccaagggaccaaggtggaaatcaaacgg

SEQ ID NO: 425 - DNA, 324 bp, Homo sapiens
gacatccagatgacccagtctccatcctccctgtctgcatctgtaggagaccgtgtcaccatcacttgccgggcaagtcagtggattgggccgtatttaaattggtaccaacagaaaccagggaaagcccctaagcccctgatctatatggcgtcctatctgccaagtggggccccatcacgcttcagtggcagtggatctgggacagatttcactctcaccatcagcagtctgcaacctgaagattttgctacgtactactgtcaacaggatctttatcctccttttacgttcggccaagggaccaaggtggaaatcaaacgg

SEQ ID NO: 426 - DNA, 324 bp, Homo sapiens
gacatccagatgacccagtctccatcctccctgtctgcatctgtaggagaccgtgtcaccatcacttgccgggcaagtcagaagattggtccgtatttacagtggtaccagcagaaaccagggaaagcccctaagctcctgatctattctgcgtccgttttgcaaagcggggtcccatcacgtttcagtggcagtggatctgggacagttttcactctcaccatcagcagtctgcaacctgaagatttcgctacgtactactgtcaacagggtattaatccgcctaggacgttcggccaagggaccaaggtggaaatcaaacgg

SEQ ID NO: 427 - DNA, 324 bp, Homo sapiens
gacatccagatgacccagtctccatcctccctgtctgcatctgtaggagaccgtgtcaccatcacttgccgggcaagtcagtggattgggccgtatttaaattggtaccaacagaaaccagggaaagcccctaagcccctgatctatatggggtggcactacccaagtggggtcccatcacgcttcagtggcagtggatctgggacagatttcactctcaccatcagcagtctgcaacctgaagattttgctacgtactactgtcaacaggatctttatcctccttttacgttcggccaagggaccaaggtggaaatcaaacgg

SEQ ID NO: 428 - DNA, 324 bp, Homo sapiens
gacatccagatgacccagtctccatcctccctgtctgcatctgtaggagaccgtgtcaccatcacttgccgggcaagtcagtggattgggccgtatttaaattggtaccaacagaaaccagggaaagcccctaagcccctgatctatatggggtcccacaacgtggagggggtcccatcacgcttcagtggcagtggatctgggacagatttcactctcaccatcagcagtctgcaacctgaagattttgctacgtactactgtcaacaggatctttatcctccttttacgttcggccaagggaccaaggtggaaatcaaacgg

SEQ ID NO: 429 - DNA, 324 bp, Homo sapiens
gacatccagatgacccagtctccatcctccctgtctgcatctgtaggagaccgtgtcaccatcacttgccgggcaagtcagtggattgggccgtatttaaattggtaccaacagaaaccagggaaagcccctaagcccctgatctattccagctggtatctgccaagtggggtcccatcacgcttcagtggcagtggatctgggacagatttcactctcaccatcagcagtctgcaacctgaagattttgctacgtactactgtcaacaggatctttatcctccttttacgttcggccaagggaccaaggtggaaatcaaacgg

SEQ ID NO: 430 - DNA, 324 bp, Homo sapiens
gacatccagatgacccagtctccatcctccctgtctgcatctgtaggagaccgtgtcaccatcacttgccgggcaagtcagtggattgggccgtatttaaattggtaccaacagaaaccagggaaagcccctaagcccctgatctatatggggtcctataaggggaggggggtcccatcacgcttcagtggcagtggatctgggacagatttcactctcaccatcagcagtctgcaacctgaagattttgctacgtactactgtcaacaggatctttatcctccttttacgttcggccaagggaccaaggtggaaatcaaacgg

SEQ ID NO: 431 - DNA, 324 bp, Homo sapiens
gacatccagatgacccagtctccatcctccctgtctgcatctgtaggagaccgtgtcaccatcacttgccgggcaggtcagaatattaatttttggttacggtggtaccagcagaaaccagggaaagcccctgcgctcctgatctatgatgcttccgagagccagagtggggtcccatcacgtttcagtggcagtggatctgggacagatttcactctcaccatcagcagtctgcaacctgaagattttgctacgtactactgtcaacaggatttaatgcctccttatacgttcggccaagggaccaaggtggaaatcaaacgg

SEQ ID NO: 432 - DNA, 324 bp, Homo sapiens
gacatccagatgacccagtctccatcctccctgtctgcatctgtaggagaccgtgtcaccatcacttgccgggcaagtcagaatagtaatttttggttacggtggtatcagcagaaaccagggaaagcccctacgctcctgatctatgatgcttcccgcagcgggagtggggtcccatcacgtttcagtggcagtggatctgggacagatttcactctcaccatcagcagtctgcaacctgaagattttgctacgtactactgtcaacaggatttaatgcctccttatacgttcggccaagggaccaaggtggaaatcaaacgg

SEQ ID NO: 433 - DNA, 324 bp, Homo sapiens
gacatccagatgacccagtctccatcctccctgtctgcatctgtaggagaccgtgtcaccatcacttgccgggcaagtcagaatattaatttttggttacggtggtaccagcagaaaccagggaaagcccctacgctcctgatctatgatgcttcccgcagccagccgggggtcccatcacgtttcagtggcagtggatctgggacagatttcactctcaccatcagcagtctgcaacctgaagattttgctacgtactactgtcaacaggatttaatgcctccttatacgttcggccaagggaccaaggtggaaatcaaacgg

SEQ ID NO: 434 - DNA, 324 bp, Homo sapiens
gacatccagatgacccagtctccatcctccctgtctgcatctgtaggagaccgtgtcaccatcacttgccgggcaagtcagaatattaatttttggttacggtggtatcagcagaaaccagggaaagcccctacgctcctgatctatgatgcttcccgcagccaggggggggtcccatcacgtttcagtggcagtggatctgggacagatttcactctcaccatcagcagtctgcaacctgaagattttgctacgtactactgtcaacaggatttaatgcctccttatacgttcggccaagggaccaaggtggaaatcaaacgg

SEQ ID NO: 435 - DNA, 324 bp, Homo sapiens
gacatccagatgacccagtctccatcctccctgtctgcatctgtaggagaccgtgtcaccatcacttgccgggcaagtcagaatattaatttttggttacggtggtaccagcagaaaccagggaaagcccctacgctcctgatctatgatgcttcccgcagccagagtggggtcccatcacgtttcagtggcagtggatctgggacagatttcactctcaccatcagcagtctgcaacctgaagattttgctacgtactactgtcaacaggatttaaggcctccttatacgttcggccaagggaccaaggtggaaatcaaacgg

SEQ ID NO: 436 - DNA, 324 bp, Homo sapiens
gacatccagatgacccagtctccatcctccctgtctgcatctgtaggagaccgtgtcaccatcacttgccgggcaagtcagaatattaatttttggttacggtggtaccagcagaaaccagggaaagcccctacgctcctgatctatgatgcttcccgcagccagagtggggtcccatcacgtttcagtggcagtggatctgggacagatttcactctcaccatcagcagtctgcaacctgaagattttgctacgtactactgtcaacaggatttatggcctccttatacgttcggccaagggaccaaggtggaaatcaaacgg

SEQ ID NO: 437 - DNA, 324 bp, Homo sapiens
gacatccagatgacccagtctccatcctccctgtctgcatctgtaggagaccgtgtcaccatcacttgccgggcaagtcagaatattaatttttggttacggtggtaccagcagaaaccagggaaagcccctacgctcctgatctatgatgcttcccgcagccagagtggggtcccatcacgtttcagtggcagtggatctgggacagatttcactctcaccatcagcagtctgcaacctgaagattttgctacgtactactgtcaacaggatttagagcctccttatacgttcggccaagggaccaaggtggaaatcaaacgg

SEQ ID NO: 438 - DNA, 324 bp, Homo sapiens
gacatccagatgacccagtctccatcctccctgtctgcatctgtaggagaccgtgtcaccatcacttgccgggcaagtcagaatattaatttttggttacggtggtaccagcagaaaccagggaaagcccctacgctcctgatctatgatgcttcccgcagccagagtggggtcccatcacgtttcagtggcagtggatctgggacagatttcactctcaccatcagcagtctgcaacctgaagattttgctacgtactactgtcaacaggatttacgccctccttatacgttcggccaagggaccaaggtggaaatcaaacgg

SEQ ID NO: 439 - DNA, 324 bp, Homo sapiens
gacatccagatgacccagtctccatcctccctgtctgcatctgtaggagaccgtgtcaccatcacttgccgggcaagtcagaatattaatttttggttacggtggtaccagcagaaaccagggaaagcccctacgctcctgatctatgatgcttcccgcagccagagtggggtcccatcacgtttcagtggcagtggatctgggacagatttcactctcaccatcagcagtctgcaacctgaagattttgctacgtactactgtcaacaggatttaacccctccttatacgttcggccaagggaccaaggtggaaatcaaacgg

SEQ ID NO: 440 - DNA, 324 bp, Homo sapiens
gacatccagatgacccagtctccatcctccctgtctgcatctgtaggagaccgtgtcaccatcacttgccgggcaagtcagaatattaatttttggttacggtggtaccagcagaaaccagggaaagcccctacgctcctgatctatgatgcttcccgcagccagagtggggtcccatcacgtttcagtggcagtggatctgggacagatttcactctcaccatcagcagtctgcaacctgaagattttgctacgtactactgtcaacaggatttagggcctccttatacgttcggccaagggaccaaggtggaaatcaaacgg

SEQ ID NO: 441 - DNA, 324 bp, Homo sapiens
gacatccagatgacccagtctccatcctccctgtctgcatctgtaggagaccgtgtcaccatcacttgccgggcaagtcagaatattaatttttggttacggtggtaccagcagaaaccagggaaagcccctacgctcctgatctatgatgcttcccgcagccagagtggggtcccatcacgtttcagtggcagtggatctgggacagatttcactctcaccatcagcagtctgcaacctgaagattttgctacgtactactgtcaacaggatttatgccctccttatacgttcggccaagggaccaaggtggaaatcaaacgg

SEQ ID NO: 442 - DNA, 324 bp, Homo sapiens
gacatccagatgacccagtctccatcctccctgtctgcatctgtaggagaccgtgtcaccatcacttgccgggcaagtcagaatattaatttttggttacggtggtaccagcagaaaccagggaaagcccctacgctcctgatctatgatgcttcccgcagccagagtggggtcccatcacgtttcagtggcagtggatctgggacagatttcactctcaccatcagcagtctgcaacctgaagattttgctacgtactactgtcaacaggatttaatgcctcctagcacgttcggccaagggaccaaggtggaaatcaaacgg

SEQ ID NO: 443 - DNA, 324 bp, Homo sapiens
gacatccagatgacccagtctccatcctccctgtctgcatctgtaggagaccgtgtcaccatcacttgccgggcaagtcagatgattgagtggcatttagattggtaccagcagaaaccagggaaagcccctaggctcctgatctatgatatttccaagttgcaaagtggggtcccatcacgtttcagtggcagtggatctgggacagatttcactctcaccatcagcagtctgcaacctgaagattttgctacgtactactgtcaacagtatgagattcctcctgtgacgttcggccaagggaccaaggtggagatcaaacgg

SEQ ID NO: 444 - DNA, 324 bp, Homo sapiens
gacatccagatgacccagtctccatcctccctgtctgcatctgtaggagaccgtgtcaccatcacttgccggacaagtcaggatattaattcgtggttaaattggtatcagcagaaaccagggaaagcccctaagctcctgatctatctggcttcctcgttgcaaagtggggtcccaccacgtttcagtggcagtggatctgggacagatttcactctcaccatcagcagtctgcaacctgaagattttgctacgtactactgtcaacagtatatgcttgagccttatacgttcggccaagggaccaaggtggaaatcaaacgg

SEQ ID NO: 445 - DNA, 324 bp, Homo sapiens
gacatccagatgacccagtctccatcctccctgtctgcatctgtaggagaccgtgtcaccatcacttgccgggcaagtcaggatattggtgagtatttagcttggtaccagcagaaaccagggaaagcccctaagctcctgatctattatatttccaggttgcaaagtggggtcccatcacgtttcagtggcagtggatctgggacagatttcactctcaccatcagcagtctgcaacctgaagattttgctacgtactactgtcaacagctgatggattttccttttacgttcggccaagggaccaaggtggaaatcaaacgg

SEQ ID NO: 446 - DNA, 324 bp, Homo sapiens
gacatccagatgacccagtctccatcctccctgtctgcatctgtaggagaccgtgtcaccatcacttgccgggcaagtcaggatattggggattggttagggtggtaccagcagaaaccagggaaagcccctaagctcctgatctatctggggtccatgttgcaaagtggagtcccatcacgtttcagtggcagtggatctgggacagatttcactctcaccatcagcagtctgcaacctgaagattttgctacgtactactgtcaacagtttaatgttatgccttttacgttcggccaagggaccaaggtggaaatcaaacgg

SEQ ID NO: 447 - DNA, 324 bp, Homo sapiens
gacatccagatgacccagtctccatcctccctgtctgcatctgtaggagaccgtgtcaccatcacttgccgggcaagtcgtcgtattgttgatatgttagattggtaccagcagaaaccagggaaagcccctaagctcctgatcgctggtggttccgtgttgcaaagtggggtcccatcacgtttcagtggcagtggatctgggacagatttcactctcaccatcagcagtctgcaacctgaagattttgctacgtactactgtggtcagtatgcggcttatcctcctacgtttggccaagggaccaaggtggaaatcaaacgg

SEQ ID NO: 448 - DNA, 324 bp, Homo sapiens
gacatccagatgacccagtctccatcctccctgtctgcatctgtaggagaccgtgtcaccatcacttgccgggcaagtcgttatattgctgatgggttagattggtaccagcagaaaccagggaaagcccctatgctcctgatcgtgggtggttccggtttgcaaagtggggtcccatcacgtttcagtggcagtggatctgggacagatttcactctcaccatcagcagtctgcaacctgaagattttgctacgtactactgtgcgcagtggtgggagtatcctgctacgttcggccaagggaccaaggtggaaatcaaacgg

SEQ ID NO: 449 - DNA, 324 bp, Homo sapiens
gacatccagatgacccagtctccatcctccctgtctgcatctgtaggagaccgtgtcaccatcacttgccgggcaagtacgaatatttggacgcatttagattggtaccagcagaaaccagggaaagcccctaagctcctgatcgctggtgtttcccggttgcaaagtggggtcccatcacgtttcagtggcagtggatctgggacagatttcactctcaccatcagcagtctgcaacctgaagattttgctacgtactactgtgcgcagtttgcggggtatcctgtgacgttcggccaagggaccaaggtggaaatcaaacgg

SEQ ID NO: 450 - DNA, 324 bp, Homo sapiens
gacatccagatgacccagtctccatcctccctgtctgcatctgtaggagaccgtgtcaccatcacttgccgggcaagtcgtaatattgatattatgttagattggtaccagcagaaaccagggaaagctcctaagctcctgatcgggagtgggtccggtttgcaaagtggggtcccatcacgtttcagtggcagtggatctgggacagatttcactctcaccatcagcagtctgcaacctgaagattttgctacgtactactgtggtcagtatgcggcttatcctcctacgtttggccaagggaccaaggtggaaatcaaacgg

SEQ ID NO: 451 - DNA, 324 bp, Homo sapiens
gacatccagatgacccagtctccatcctccctgtctgcatctgtaggagaccgtgtcaccatcacttgccgggcaagtcttgatattggtgattggttacattggtaccagcagaaaccagggaaagcccccaagctcctgatcgggtggggttccgggttgcaaagtggggtcccatcacgtttcagtggcagtgggtctgggacagatttcactctcaccatcagcagtctgcaacctgaagattttgctacgtactactgtttgcaggaggggttgggtcctccgacgttcggccaagggaccaaggtggaaatcaaacgg

SEQ ID NO: 452 - DNA, 324 bp, Homo sapiens
gacatccagatgacccagtctccatcctccctgtctgcatctgtaggagaccgtgtcaccatcacttgccgggcaagtcttgatattggtgattggttacattggtaccagcagaaaccagggaaagcccccaagctcctgatcgggtggggttccgggttgcaaagtggggtcccatcacgtttcagtggcagtgggtctgggacagatttcactctcaccatcagcagtctgcaacctgaagattttgctacgtactactgtttgcaggaggggtggggtcctccgacgttcggccaagggaccaaggtggaaatcaaacgg

SEQ ID NO: 453 - DNA, 324 bp, Homo sapiens
gacatccagatgacccagtcaccatcctccctgtctgcatctgtaggagaccgtgtcaccatcacttgccgggcaagtcttgatattggtgattggttacattggtaccagcagaaaccagggaaagcccccaagctcctgatcgcgtgggcgtccttgttgcccagtggggtcccatcacgtttcagtggcagtgggtctgggacagatttcactctcaccatcagcagtctgcaacccgaagattttgctacgtactactgtttgcaggaggggtggggtcctccgacgttcggccaagggaccaaggtggaaatcaaacgg

SEQ ID NO: 454 - DNA, 324 bp, Homo sapiens
gacatccagatgacccagtcaccatcctccctgtctgcatctgtaggagaccgtgtcaccatcacttgccgggcaagtcttgatattggtgattggttacattggtaccagcagaaaccagggaaagcccccaagctcctgatcgcctgggcgtccacgttggacagtggggtcccatcacgtttcagtggcagtgggtctgggacagatttcactctcaccatcagcagtctgcaacccgaagattttgctacgtactactgtttgcaggaggggtggggtcctccgacgttcggccaagggaccaaggtggaaatcaaacgg

SEQ ID NO: 455 - DNA, 324 bp, Homo sapiens
gacatccagatgacccagtcaccatcctccctgtctgcatctgtaggagaccgtgtcaccatcacttgccgggcaagtcttgatattggtgattggttacattggtaccagcagaaaccagggaaagcccccaagctcctgatcccgtgggcctccgggttgtggagtggggtcccatcacgtttcagtggcagtgggtctgggacagatttcactctcaccatcagcagtctgcaacctgaagattttgctacgtactactgtttgcaggaggggtggggtcctccgacgttcggccaagggaccaaggtggaaatcaaacgg

SEQ ID NO: 456 - DNA, 324 bp, Homo sapiens
gacatccagatgacccagtcaccatcctccctgtctgcatctgtaggagaccgtgtcaccatcacttgccgggcaagtcttgatattggtgattggttacattggtaccagcagaaaccaggggaagcccccaagctcctgatcagctgggcgtccacgttgccgagtggggtcccatcacgtttcagtggcagtgggtcggggacagatttcactctcaccatcagcagtctgcaacccgaagatttcgctacgtactactgtttgcaggaggggtggggtcctccgacgttcggccaagggaccaaggtggaaatcaaacgg

SEQ ID NO: 457 - DNA, 324 bp, Homo sapiens
gacatccagatgacccagtcaccatcctccctgtctgcatctgtaggagaccgtgtcaccatcacttgccgggcaagtcgcaacattggcgactggttacattggtatcagcagaaaccagggaaagcccccaagctcctgatcgcctgggcgtccacgttggacagtggggtcccatcacgtttcagtggcagtgggtctgggacagatttcactctcaccatcagcagtctgcaacccgaagattttgctacgtactactgtttgcaggaggggtggggtcctccgacgttcggccaagggaccaaggtggaaatcaaacgg

SEQ ID NO: 458 - DNA, 324 bp, Homo sapiens
gacatccagatgacccagtcaccatcctccctgtctgcatctgtaggagaccgtgtcaccatcacttgccgggcaagtcttgatattggtgattggttacattggtaccagcagaaaccagggaaagcccccaagctcctgatcagctgggcgtccacgttggacagtggggtcccatcacgtttcagtggcagtgggtctgggacagatttcactctcaccatcagcagtctgcaacccgaagattttgctacgtactactgtttgcaggaggggtggggtcctccgacgttcggccaagggaccaaggtggaaatcaaacgg

SEQ ID NO: 459 - DNA, 324 bp, Homo sapiens
gacatccagatgacccagtcaccatcctccctgtctgcatctgtaggagaccgtgtcaccatcacttgccgggcaagtcttgatattggtgattggttacattggtatcagcagaaaccagggaaagcccccaagctcctgatcagctgggcgtccacgttgccgagtggggtcccatcacgtttcagtggcagtgggtcggggacagatttcactctcaccatcagcagtctgcaacccgaagatttcgctacgtactactgtttgcaggaggggtggggtcctccgacgttcggccaagggaccaaggtggaaatcaaacgg

SEQ ID NO: 460 - DNA, 324 bp, Homo sapiens
gacatccagatgacccagtcaccatcctccctgtctgcatctgtaggagaccgtgtcaccatcacttgccgggcaagtaggtcgattggcgactggttacattggtatcagcagaaaccagggaaagcccccaagctcctgatcgcctgggcgtccacgttggacagtggggtcccatcacgtttcagtggcagtgggtctgggacagatttcactctcaccatcagcagtctgcaacctgaagatttcgctacgtactactgtttgcaggaggggtggggtcctccgacgttcggccaagggaccaaggtggaaatcaaacgg

SEQ ID NO: 461 - DNA, 324 bp, Homo sapiens
gacatccagatgacccagtcaccatcctccctgtctgcatctgtaggagaccgtgtcaccatcacttgccgggcaagtcgccccattgccgactggttacattggtatcagcagaaaccagggaaagcccccaagctcctgatcgcctgggcgtccacgttggacagtggggtcccatcacgtttcagtggcagtgggtctgggacagatttcactctcaccatcagcagtctgcaacccgaagatttcgctacgtactactgtttgcaggaggggtggggtcctccgacgttcggccaagggaccaaggtggaaatcaaacgg

SEQ ID NO: 462 - DNA, 324 bp, Homo sapiens
gacatccagatgacccagtcaccatcctccctgtctgcatctgtaggagaccgtgtcaccatcacttgccgggcaagtcttgatattggtgattggttacattggtaccagcagaaaccagggaaagcccccaagctcctgatcagctgggcgtccacgttgccgagtggggtcccatcacgtttcagtggcagtgggtcggggacagatttcactctcaccatcagcagtctgcaacccgaagatttcgctacgtactactgtttgcaggaggggtggggtcctccgacgttcggccaagggaccaaggtggaaatcaaacgg

SEQ ID NO: 463 - DNA, 324 bp, Homo sapiens
gacatccagatgacccagtcaccatcctccctgtctgcatctgtaggagaccgtgtcaccatcacttgccgggcaagtagggcgattagcgactggttacattggtatcagcagaaaccagggaaagcccccaagctcctgatcgcctgggcgtccacgttggacagtggggtcccatcacgtttcagtggcagtgggtctgggacagatttcactctcaccatcagcagtctgcaacctgaagatttcgctacgtactactgtttgcaggaggggtggggtcctccgacgttcggccaagggaccaaggtggaaatcaaacgg

SEQ ID NO: 464 - DNA, 324 bp, Homo sapiens
gacatccagatgacccagtcaccatcctccctgtctgcatctgtaggagaccgtgtcaccatcacttgccgggcaagtgcccccattagcgactggttacattggtaccagcagaaaccagggaaagcccccaagctcctgatcgcctgggcgtccacgttggacagtggggtcccatcacgtttcagtggcagtgggtctgggacagatttcactctcaccatcagcagtctgcaacccgaagattttgctacgtactactgtttgcaggaggggtggggtcctccgacgttcggccaagggaccaaggtggaaatcaaacgg

SEQ ID NO: 465 - DNA, 324 bp, Homo sapiens
gacatccagatgacccagtcaccatcctccctgtctgcatctgtaggagaccgtgtcaccatcacttgccgggcaagtcaccccattggggactggttacattggtatcagcagaaaccagggaaagcccccaagctcctgatcgcctgggcgtccacgttggacagtggggtcccatcacgtttcagtggcagtgggtctgggacagatttcactctcaccatcagcagtctgcaacctgaagattttgctacgtactactgtttgcaggaggggtggggtcctccgacgttcggccaagggaccaaggtggaaatcaaacgg

SEQ ID NO: 466 - DNA, 324 bp, Homo sapiens
gacatccagatgacccaatcaccatcctccctgtctgcatctgtaggagaccgtgtcaccatcacttgccgggcaagtcgccccattagcgactggttacattggtatcagcagaaaccagggaaagcccccaagctcctgatcgcctgggcgtccacgttggacagtggggtcccatcacgtttcagtggcagtgggtcggggacagatttcactctcaccatcagcagtctgcaacccgaagatttcgctacgtactactgtttgcaggaggggtggggtcctccgacgttcggccaagggaccaaggtggaaatcaaacgg

SEQ ID NO: 467 - DNA, 324 bp, Homo sapiens
  misc_feature 107: n = A,T,C or G
gacatccagatgacccaatcaccatcctccctgtctgcatctgtaggagaccgtgtcaccatcacttgccgggcaagtcttgatattggtgactggttacattggtnccagcagaaaccagggaaagccccccagctcctgatcgcctgggcgtccacgtcggacagtggggtcccatcacgtttcagtggcagtgggtcggggacagatttcactctcaccatcagcagtctgcaacccgaagatttcgctacgtactactgtttgcaggaggggtggggtcctccgacgttcggccaagggaccaaggtggaaatcaaacgg

SEQ ID NO: 468 - DNA, 324 bp, Homo sapiens
  misc_feature 107: n = A,T,C or G
gacatccagatgacccaatcaccatcctccctgtctgcatctgtaggagaccgtgtcaccatcacttgccgggcaagtcttgatattagggattggttacattggtnccagcagaaaccagggaaagcccccaagctcctgatcgcctgggcgtccacgttggacagtggggtcccatcacgtttcagtggcagtgggtcggggacagatttcactctcaccatcagcagtctgcaacccgaagatttcgctacgtactactgtttgcaggaggggtggggtcctccgacgttcggccaagggaccaaggtggaaatcaaacgg

SEQ ID NO: 469 - DNA, 324 bp, Homo sapiens
gacatccagatgacccaatcaccatcctccctgtctgcatctgtaggagaccgtgtcaccatcacttgccgggcaagtcgccccattagcgactggttacattggtatcagcagaaaccagggaaagcccccaagctcctgatcgcctgggcgtccacgttggacagtggggtcccatcacgtttcagtggcagggggtcggggacagatttcactctcaccatcagcagtctgcaacccgaagattttgctacgtactactgtttgcaggagtggtggggtcctccgacgttcggccaagggaccaaggtggaaatcaaacgg

SEQ ID NO: 470 - DNA, 324 bp, Homo sapiens
gacatccagatgacccaatcaccatcctccctgtctgcatctgtaggagaccgtgtcaccatcacttgccgggcaagtcgccccattagcgactggttacattggtatcagcagaaaccagggaaagcccccaagctcctgatcgcctgggcgtccacgttggacagtggggtcccatcacgtttcagtggcagtgggtcggggacagatttcactctcaccatcagcagtctgcaacccgaagattttgctacgtactactgtttgcagagcgggtggggtcctccgacgttcggccaagggaccaaggtggaaatcaaacgg

SEQ ID NO: 471 - DNA, 324 bp, Homo sapiens
gacatccagatgacccaatcaccatcctccctgtctgcatctgtaggagaccgtgtcaccatcacttgccgggcaagtcgccccattagcgactggttacattggtatcagcagaaaccagggaaagccccacggctcctgatctatacggcttcccgcagccagagtggggtcccatcacgtttcagtggcagtgggtcggggacagatttcactctcaccatcagcagtctgcaacccgaagattttgctacgtactactgtttgcaggaggggtggaagcctccgacgttcggccaagggaccaaggtggaaatcaaacgg

SEQ ID NO: 472 - DNA, 324 bp, Homo sapiens
gacatccagatgacccaatcaccatcctccctgtctgcatctgtaggagaccgtgtcaccatcacttgccgggcaagtcgcgggattagcgactggttacactggtaccagcagaaaccagggaaagcccccaagctcctgatcgcctgggcgtccacgttggacagtggggtcccatcacgtttcagtggcagtgggtcggggacagatttcactctcaccatcagcagtctgcaacccgaagatttcgctacgtactactgtttgcaggaggggtggggtcctccgacgttcggccaagggaccaaggtggaaatcaaacgg

SEQ ID NO: 473 - DNA, 324 bp, Homo sapiens
gacatccagatgacccaatcaccatcctccctgtctgcatctgtaggagaccgtgtcaccatcacttgccgggcaagtcgcaacattagcgactggttacattggtatcagcagaaaccagggaaagcccccaagctcctgatcgcctgggcgtccacgttggacagtggggtcccatcacgtttcagtggcagtgggtcggggacagatttcactctcaccatcagcagtctgcaacccgaagatttcgctacgtactactgtttgcaggaggggtggggtcctccgacgttcggccaagggaccaaggtggaaatcaaacgg

SEQ ID NO: 474 - DNA, 324 bp, Homo sapiens
gacatccagatgacccaatcaccatcctccctgtctgcatctgtaggagaccgtgtcaccatcacttgccgggcaagtcgcaacattagcgactggttacattggtatcagcagaaaccagggaaagcccccaggctcctgatcgcctgggcgtccacgttggacagtggggtcccatcacgtttcagtggcagtgggtcggggacagatttcactctcaccatcagcagtctgcaacccgaagatttcgctacgtactactgtttgcaggaggggtggggtcctccgacgttcggccaagggaccaaggtggaaatcaaacgg

SEQ ID NO: 475 - DNA, 324 bp, Homo sapiens
gacatccagatgacccaatcaccatcctccctgtctgcatctgtaggagaccgtgtcaccatcacttgccgggcaagtcgcaagattagcgactggttacattggtatcagcagaaaccagggaaagcccccaagctcctgatcgcctgggcgtccacgttggacagtggggtcccatcacgtttcagtggcagtgggtcggggacagatttcactctcaccatcagcagtctgcaacccgaagatttcgctacgtactactgtttgcaggaggggtggggtcctccgacgttcggccaagggaccaaggtggaaatcaaacgg

SEQ ID NO: 476 - DNA, 324 bp, Homo sapiens
gacatccagatgacccaatcaccatcctccctgtctgcatctgtaggagaccgtgtcaccatcacttgccgggcaagtgagcccattagcgactggttacattggtaccagcagaaaccagggaaagcccccaagctcctgatcgcctgggcgtccacgttggacagtggggtcccatcacgtttcagtggcagtgggtcggggacagatttcactctcaccatcagcagtctgcaacccgaagatttcgctacgtactactgtttgcaggaggggtggggtcctccgacgttcggccaagggaccaaggtggaaaccaaacgg

SEQ ID NO: 477 - DNA, 324 bp, Homo sapiens
gacatccagatgacccaatcaccatcctccctgtctgcatctgtaggagaccgtgtcaccatcacttgccgggcaagtcgccccattagcgactggttacattggtaccagcagaaaccagggaaagcccctaagctcctgatcgcctgggcgtccgtattggacagtggggtcccatcacgtttcagtggcagtgggtcggggacagatttcactctcaccatcagcagtctgcaacccgaagatttcgctacgtactactgtttgcaggaggggtggggtcctccgacgttcggccaagggaccaaggtggaaatcaaacgg

SEQ ID NO: 478 - DNA, 324 bp, Homo sapiens
gacatccagatgacccaatcaccatcctccctgtctgcatctgtaggagaccgtgtcaccatcacttgccgggcaagtcgccccattagcgactggttacattggtaccagcagaaaccagggaaagcccctaagctcctgatcgcctgggcgccaacgttggacagtggggtcccatcacgtttccgtggcagtgggtcggggacagatttcactctcaccatcagcagtctgcaacccgaagatttcgctacgtactactgtttgcaggaggggtggggtcctccgacgttcggccaagggaccaaggtggaaatcaaacgg

SEQ ID NO: 479 - DNA, 324 bp, Homo sapiens
gacatccagatgacccaatcaccatcctccctgtctgcatctgtaggagaccgtgtcaccatcacttgccgggcaagtcgccccattagcgactggttacattggtaccagcagaaaccagggaaagcccctaagctcctgatcgcctgggcgtccacgttggtcagtggggtcccatcacgtttcagtggcagtgggtcggggacagatttcactctcaccatcagcagtctgcaacccgaagatttcgctacgtactactgtttgcaggaggggtggggtcctccgacgttcggccaagggaccaaggtggaaatcaaacgg

SEQ ID NO: 480 - DNA, 324 bp, Homo sapiens
gacatccagatgacccaatcaccatcctccctgtctgcatctgtaggagaccgtgtcaccatcacttgccgggcaagtcgccccattagcgactggttacattggtatcagcagaaaccagggaaagcccccaagctcctgatcgcctgggcgtccacgttgctcagtggggtcccatcacgtttcagtggcagtgggtcggggacagatttcaccctcaccatcagcagtctgcaacccgaagatttcgctacgtactactgtttgcaggaggggtggggtcctccgacgttcggccaagggaccaaggtggaaatcaaacgg

SEQ ID NO: 481 - DNA, 324 bp, Homo sapiens
gacatccagatgacccaatcaccatcctccctgtctgcatctgtaggagaccgtgtcaccatcgcttgccgggcaagtcgccccattagcgactggttacattggtatcagcagaaaccagggaaagcccccaagctcctgatcgcctgggcgtccacgttgcaaagtggggtcccatcacgtttcagtggcagtgggtcggggacagatttcactctcaccatcagcagtctgcatcccgaagatttcgctacgtactactgtttgcaggaggggtggggtcctccgacgttcggccaagggaccaaggtggaaatcaaacgg

SEQ ID NO: 482 - DNA, 324 bp, Homo sapiens
gacatccagatgacccaatcaccatcctccctgtctgcatctgtaggagaccgtgtcaccatcacttgccgggcaagtcgccccattagcgactggttacattggtagcagcagaaaccagggaaagcccccaagctcctgatcgcctgggcgtccacgttgctgaatggggtcccatcacgtttcagtggcagtgggtcggggacagatttcactctcaccatcagcagtctgcaacccgaagatttcgctacgtactactgtttgcaggaggggtggggtcctccgacgttcggccaagggaccaaggtggaaatcaaacgg

SEQ ID NO: 483 - DNA, 324 bp, Homo sapiens
gacatccagatgacccaatcaccatcctccctgtctgcatctgtaggagaccgtgtcaccatcacttgccgggcaagtcgccccattagcgactggttacattggtaccagcagaaaccagggaaagcccccaagctcctgatcgcctgggcgtccacgttggtgagtggggtcccatcacgtttcagtggcagtgggtcggggacagatttcactctcaccatcagcagtctgcaacccgaagatttcgctacgtactactgtttgcaggaggggtggggtcctccgacgttcggccaagggaccaaggtggaaatcaaacgg

SEQ ID NO: 484 - DNA, 324 bp, Homo sapiens
gacatccagatgacccaatcaccatcctccctgtctgcatctgtaggagaccgtgtcaccatcacttgccgggcaagtcgccccattagcgactggttacattggtatcagcagaaaccagggaaagcccccaagctcctgatcgcctgggcgtccacgtcggacagtggggtcccatcacgtttcagtggcagtgggtcggggacagatttcactctcaccatcagcagtctgcaacccgaagatttcgctacgtactactgtttgcaggaggggtggggtcctccgacgttcggccaagggaccaaggtggaaatcaaacgg

SEQ ID NO: 485 - DNA, 324 bp, Homo sapiens
gacatccagatgacccaatcaccatcctccctgtctgcatctgtaggagaccgtgtcaccatcacttgccgggcaagtcgccccattagcgactggttacattggtaccagcagaaaccagggaaagcccctaagctcctgatcgcctgggcgtccacgttggaccttggggtcccatcacgtttcagtggcagtgggtcggggacagatttcactctcaccatcagcagtctgcaacccgaagatttcgctacgtactactgtttgcaggaggggtggggtcctccgacgttcggccaagggaccaaggtggaaatcaaacgg

SEQ ID NO: 486 - DNA, 324 bp, Homo sapiens
gacatccagatgacccaatcaccatcctccctgtctgcatctgtaggagaccgtgtcaccatcacttgccgggcaagtcgccccattagcgactggttacattggtatcagcagaaaccagggaaagcccccaagctcctgatcgcctgggcgtccacgttggaccagggggtcccatcacgtttcagtggcagtgggtcggggacagatttcactctcaccatcagcagtctgcaacccgaagatttcgctacgtactactgtttgcaggaggggtggggtcctccgacgttcggccaagggaccaaggtggaaatcaaacgg

SEQ ID NO: 487 - DNA, 324 bp, Homo sapiens
gacatccagatgacccaatcaccatcctccctgtctgcatctgtaggagaccgtgtcaccatcacttgccgggcaagtcgccccattagcgactggttacattggtaccagcagaaaccagggaaagcccctaagctcctgatcgcctgggcgtccacgttggacgacggggtcccatcacgtttcagtggcagtgggtcggggacagatttcactctcaccatcagcagtctgcaacccgaagatttcgctacgtactactgtttgcaggaggggtggggtcctccgacgttcggccaagggaccaaggtggaaatcaaacgg

SEQ ID NO: 488 - DNA, 324 bp, Homo sapiens
gacatccagatgacccaatcaccatcctccctgtctgcatctgtaggagaccgtgtcaccatcacttgccgggcaagtcgccccattagcgactggttacattggtaccagcagaaaccagggaaagcccctaagctcctgatcgcctgggcgtccacgttggaccatggggtcccatcacgtttcagtggcagtgggtcggggacagatttcactctcaccatcagcagtctgcaacccgaagatttcgctacgtactactgtttgcaggaggggtggggtcctccgacgttcggccaagggaccaaggtggaaatcaagcgg

SEQ ID NO: 489 - DNA, 324 bp, Homo sapiens
gacatccagatgacccaatcaccatcctccctgtctgcatctgtaggagaccgtgtcaccatcacttgccgggcaagtcgccccattagcgactggttacattggtatcagcagaaaccagggaaagcccccaagctcctgatcgcctgggcgtccacgttggacagtggggtcccatcacgtttcagtggcagtgggtcggggacagatttcactctcaccatcagcagtctgcaacccgaagatttcgctgcgtactactgtttgcaggaggggtggggtcctccgacgttcggccaagggaccaaggtggaaatcaaacgg

SEQ ID NO: 490 - DNA, 324 bp, Homo sapiens
gacatccagatgacccagtcaccatcctccctgccggcatctgtaggagaccgtgtcaccatcacttgccgggcaagtcttgatattggtgattggttacattggtaccagcagaaaccagggaaagcccccaagctcctgatcgcctgggcgtccacgttggacagtggggtcccatcacgtttcagtggcagtgggtctgggacagatttcactctcaccatcagcagtctgcaacccgaagattttgctacgtactactgtttgcaggaggggtggggtcctccgacgttcggccaagggaccaaggtggaaatcaaacgg

SEQ ID NO: 491 - DNA, 324 bp, Homo sapiens
gacatccagatgacccagtcaccatcctccctgtctgcatctgtaggagaccgtgtcaccatcacttgccgggcaagtcttgatattggtgattggttacattggtaccagcagaaaccagggaaagaccctaagctcctgatcgcctgggcgtccacgttggacagtggggtcccatcacgtttcagtggcagtgggtctgggacagatttcactctcaccatcagcagtctgcaacccgaagattttgctacgtactactgtttgcaggaggggtggggtcctccgacgttcggccaagggaccaaggtggaaatcaaacgg

SEQ ID NO: 492 - DNA, 324 bp, Homo sapiens
gacatccagatgacccagtcaccatcctccctgtctgcatctgtaggagaccgtgtcaccatcacttgccgggcaagtcttgatattggtgattggttacattggtaccagcagaaaccagggaaagcccccaagctcctgatcgcctgggcgtccacgttggacagtggggtcccatcacgtttcagtggcagtgggtctgggacagatttcactctcaccatcagcagtctgcaacccgaagattttgctacgtactactgtttgcagagcgggtggggtcctccgacgttcggccaagggaccaaggtggaaatcaaacgg

SEQ ID NO: 493 - DNA, 324 bp, Homo sapiens
gacatccagatgacccaatcaccatcctccctgccggcatctgtaggagaccgtgtcaccatcacttgccgggcaagtcgccccattagcgactggttacattggtatcagcagaaaccagggaaagcccccaagctcctgatcgcctgggcgtccacgttggacagtggggtcccatcacgtttcagtggcagtgggtcggggacagatttcactctcaccatcagcagtctgcaacccgaagatttcgctacgtactactgtttgcaggaggggtggggtcctccgacgttcggccaagggaccaaggtggaaatcaaacgg

SEQ ID NO: 494 - DNA, 324 bp, Homo sapiens
gacatccagatgacccagtctccatcctccctgtctgcatctgtaggagaccgtgtcaccatcacttgccgggcaagtaggcgtattggtaatgatttagtttggtaccagcagaaaccagggaaagcccctaagctcctgatcggtgggggttcccggttgcaaagtggggtcccatcacgtttcagtggcagtggatctgggacagatttcactctcaccatcagcagtctgcaacctgaagattttgctacgtactactgtgttcagttgtatcggctgcctgtgacgttcggccaagggaccaaggtggaaatcaaacgg

SEQ ID NO: 495 - DNA, 324 bp, Homo sapiens
gacatccagatgacccagtctccatcctccctgtctgcatctgtaggagaccgtgtcaccatcacttgccgggcaagtacgaatatttgggggggtttagattggtaccagcagaaaccagggaaagcccctaagctcctgatcggggcggtttccgagttgcaaagtggggtcccatcacgtttcagtggcagtggatctgggacagatttcactctcaccatcagcagtctgcaacctgaagattttgctacgtactactgtgggcagtgggctgtgtatcctcctacgttcggccaagggaccaaggtggaaatcaaacgg

SEQ ID NO: 496 - DNA, 324 bp, Homo sapiens
gacatccagatgacccagtctccatcctccctgtctgcatctgtaggagaccgtgtcaccatcacttgccgggcaagtaggcagatttggaatatgttagattggtaccagcagaaaccagggaaagcccctaagctcctgatcggtgggggttcccggttgcaaagtggggtcccatcacgtttcagtggcagtggatctgggacagatttcactctcaccatcagcagtctgcaacctgaagattttgctacgtactactgtgggcagtatgctgggtatcctgcgacgttcggccaagggaccaaggtggaaatcaaacgg

SEQ ID NO: 497 - DNA, 324 bp, Homo sapiens
gacatccagatgacccagtctccatcctccctgtctgcatctgtaggagaccgtgtcaccatcacttgccgggcaagtactaatattcatgatggtttagattggtaccagcagaaaccagggaaagcccctaagctcctgatctttgcgtcgtccgagttgcaaagtggggtcccatcacgtttcagtggcagtggatctgggacagatttcactctcaccatcagcagtctgcaacctgaagattttgctacgtactactgtgggcagtggttttcgtatcctgctacgttcggccaagggaccaaggtggaaatcaaacgg

SEQ ID NO: 498 - DNA, 324 bp, Homo sapiens
gacatccagatgacccagtctccatcctccctgtctgcatctgtaggagaccgtgtcaccatcacttgccgggcaagtcaggttattgatgatgatttaagttggtaccagcagaaaccagggaaagcccctaagctcctgatcggggttgggtcctggttgcaaagtggggtcccatcacgtttcagtggcagtggatctgggacagatttcactctcaccatcagcagtctgcaacctgaagattttgctacgtactactgtgctcagggggcgtgggttcctgtgacgttcggccaagggaccaaggtggaaatcaaacgg

SEQ ID NO: 499 - DNA, 324 bp, Homo sapiens
gacatccagatgacccagtctccatcctccctgtctgcatctgtaggagaccgtgtcaccatcacttgccgggcaagttctcctattgataatcagttactttggtaccagcagaaaccagggaaagcccctaagctcctgatcgcgggtgtttccgagttgcaaagtggggtcccatcacgtttcagtggcagtggatctgggacagatttcactctcaccatcagcagtctgcaacctgaagattttgctacgtactactgtgtgcaggttggtcgttggcctgctacgttcggccaagggaccaaggtggaaatcaaacgg

SEQ ID NO: 500 - protein, 108 aa, Homo sapiens
DIQMTQSPSSLSASVGDRVTITCRASQPIGIWLNWYQQKPGKAPKLLIYEISILQSGVPSRFSGSGSGTDFTLTISSLQPEDFATYYCQQDLTNPRTFGQGTKVEIKR

SEQ ID NO: 501 - protein, 108 aa, Homo sapiens
DIQMTQSPSSLSASVGDRVTITCRASQSIDLWLAWYQQKPGKAPRLLIYYSSQLQSGVPSRFSGSGSGTDFTLTISSLQPEDFATYYCQQLFITPLTFGQGTKVEIKR

SEQ ID NO: 502 - protein, 108 aa, Homo sapiens
DIQMTQSPSSLSASVGDRVTITCRASQDIWEYLAWYQQKPGKAPKLLIYGSSRLQSGVPSRFSGSGSGTDFTLTISSLQPEDFATYYCQQDYVYPPTFGQGTKVEIKR

SEQ ID NO: 503 - protein, 108 aa, Homo sapiens
DIQMTQSPSSLSASVGDRVTITCRASQEIHEFLNWYQQKPGKAPKLLIYEVSHLQSGVPSRFSGSGSGTDFTLTISSLQPEDFATYYCQQDFTDPFTFGQGTKVEIKR

SEQ ID NO: 504 - protein, 108 aa, Homo sapiens
DIQMTQSPSSLSASVGDRVTITCRASQGITDWLAWYQQKPGKAPKLLIYGSSWLQSGVPSRFSGSGSGTDFTLTISSLQPEDFATYYCQQLMSPPLTFGQGTKVEIKR

SEQ ID NO: 505 - protein, 108 aa, Homo sapiens
DIQMAQSPSSLSASVGDRVTITCRASQPIYDWLAWYQQKPGKAPKLLIYSASELQSGVPSRFSGSGSGTDFTLTISSLQPEDFATYYCQQLQTKPLTFGQGTKVEIKR

SEQ ID NO: 506 - protein, 108 aa, Homo sapiens
DIQMTQSPSSLSTSVGDRVTITCRASQDIGDWLAWYQQKPGKAPKLLIYYNSHLQSGVPSRFSGSGSGTDFTLTISSLQPEDSATYYCQQYADIPMTFGQGTKVEIKR

SEQ ID NO: 507 - protein, 108 aa, Homo sapiens
DIQMTQSPSSLSASVGDRVTITCRASQPIAYFLSWYQQKPGKAPKLLIYNDSTLQSGVPSRFSGSGSGTDFTLTISSLQPEDFATYYCQQDAFHPPTFGQGTKVEIKR

SEQ ID NO: 508 - protein, 108 aa, Homo sapiens
DIQMTQCPSSLSASVGDRVTITCRASQPIGDWLNWYQQKPGKAPKLLIYHISNLQSGVPSRFSGSGSGTDFTLTISSLQPEDFATYYCQQLLQYPLTFGQGTKVEIKR

SEQ ID NO: 509 - protein, 108 aa, Homo sapiens
DIQMTQSPSSLSASVGDRVTITCRASQNINFWLRWYQQKPGKAPTLLIYDASALQSGVPSRFSGSGSGTDFTLTISSLQPEDFATYYCQQDFNPPYTFGQGTKVEIKR

SEQ ID NO: 510 - protein, 108 aa, Homo sapiens
DIQMTQSPSSLSASVGDRVTITCRASQNINFWLRWYQQKPGKAPTLLIYDASRSQSGVPSRFSGSGSGTDFTLTISSLQPEDFATYYCQQDFNPPYTFGQGTKVEIKR

SEQ ID NO: 511 - protein, 108 aa, Homo sapiens
DIQMTQSPSSLSASVGDRVTITCRASQNINFWLRWYQQKPGKAPTLLIYDASALQSGVPSRFSGSGSGTDFTLTISSLQPEDFATYYCQQDLMPPYTFGQGTKVEIKR

SEQ ID NO: 512 - protein, 108 aa, Homo sapiens
DIQMTQSPSSLSASVGDRVTITCRASQNINFWLRWYQQKPGKAPTLLIYDASRSQSGVPSRFSGSGSGTDFTLTISSLQPEDFATYYCQQDLMPPYTFGQGTKVEIKR

SEQ ID NO: 513 - protein, 108 aa, Homo sapiens
DIQMTQSPSSLSASVGDRVTITCHASQNINFWLRWYQQKPGKAPTLLIYDASALQSGVPSRFSGSGSGTDFTLTISSLQPEDFATYYCQQDFNPPYTFGQGTKVEIKR

SEQ ID NO: 514 - protein, 108 aa, Homo sapiens
DIQMTQFPSSLSASVGDRVTITCTTDQNINFWLRWYQQKPGKAPTLLIYDASALQSGVPSRFSGSGSGTDFTLTISSLQPEDFATYYCQQDFNPPYTFGQGTKVEIKR

SEQ ID NO: 515 - protein, 108 aa, Homo sapiens
DIQMTQSPSSLSASVGDRVTITCAASQNTNFWLRWYQQKPGKAPTLLIYDASALQSGVPSRFSGSGSGTDFTLTISSLQPEDFATYYCQQDFNPPYTFGQGTKVEIKR

SEQ ID NO: 516 - protein, 108 aa, Homo sapiens
DIQMTQSPSSLSASVGDRVTITCNTTQNINFWLRWYQQKPGKAPTLLIYDASALQSGVPSRFSGSGSGTDFTLTISSLQPEDSATYYCQQDFNPPYTFGQGTKVEIKR

SEQ ID NO: 517 - protein, 108 aa, Homo sapiens
DIQMTQSPSSLSASVGDRVTITCRASQNINFWLRWYQQKPGKAPTLLIYDASAPNNGVPSRFSGSGSGTDFTLTISSLQPEDFATYYCQQDFNPPYTFGQGTKVEIKR

SEQ ID NO: 518 - protein, 108 aa, Homo sapiens
DIQMTQSPSSLSASVGDRVTITCRASQNINFWLRWYQQKPGKAPTLLIYDASQPQSGVPSRFSGSGSGTDFTLTISSLQPEDFATYYCQQDFNPPYTFGQGTKVEIKR

SEQ ID NO: 519 - protein, 108 aa, Homo sapiens
DIQMTQSPSSLSASVGDRVTITCRASQNINFWLRWYQQKPGKAPTLLIYDASALQSGVPSRFSGSGSGTDFTLTISSLQPEDFATYYCQQDFMNPFTFGQGTKVEING

SEQ ID NO: 520 - protein, 108 aa, Homo sapiens
DIQMTQSPSSLSASVGDRVTITCRASQNINFWLRWYQQKPGKAPTLLIYDASALQSGVPSRFSGSGSGTDFTLTISSLQPEDFATYYCQQDFHLPFTFGQGTKVEIKR

SEQ ID NO: 521 - protein, 108 aa, Homo sapiens
DIQMTQSPSSLSASVGDRVTITCRASQNINFWLRWYQQKPGKAPTLLIYDASALQSGVPSRFSGSGSGTDFTLTISSLQPEDFATYYCQQDFMFPLTFGQGTKVEIKR

SEQ ID NO: 522 - protein, 108 aa, Homo sapiens
DIQMTQSPSSLSASVGDRVTITCRASQNINFWLRWYQQKPGKAPTLLIYDASALQSGVPSRFSGSGSGTDFTLTISSLQPEDFATYYCQQDFSQPFTFGQGTKVEIKR

SEQ ID NO: 523 - protein, 108 aa, Homo sapiens
DIQMTQSPSSLSASVGDRVTITCRASQSINFWLRWYQQKPGKAPTLLIYDASRTQSGVPSRFSGSGSGTDFTLTISSLQPEDFATYYCQQDFNPPYTFGQGTKVEIKR

SEQ ID NO: 524 - protein, 108 aa, Homo sapiens
  VARIANT 106: Xaa = Any Amino Acid
DIQMTQSPSSLSASVGNRVTITCRASQNINFWLRWYQQKPGKAPTLLIYDASRSQSGVPSRFSGSGSGTDFTLTISSLQPEDFATYYCQQDFMNPFTFGQGTKVEXKR

SEQ ID NO: 525 - protein, 108 aa, Homo sapiens
DIQMTQSPSSLSASVGDRVTITCRASQNINFWLRWYQQKPGKAPTLLIYDASRSQSGVPSRFSGSGSGTDFTLTISSLQPEDFATYYCQQDFHLPFTFGQGTKVEIKR

SEQ ID NO: 526 - protein, 108 aa, Homo sapiens
DIQMTQSPSSLSASVGDRVTITCRASQNINFWLRWYQQKPGKAPTLLIYDASRSQSGVPSRFSGSGSGTDFTLTISSLQPEDFATYYCQQDFMFPLTFGQGTKVEIKR

SEQ ID NO: 527 - protein, 108 aa, Homo sapiens
DIQMTQSPSSLSASVGDRVTITCRASQNINFWLRWYQQKPGKAPTLLIYDASRSQSGVPSRFSGSGSGTDFTLTISSLQPEDFATYYCQQDFSQPFTFGQGTKVEIKR

SEQ ID NO: 528 - protein, 108 aa, Homo sapiens; identical to SEQ ID NO: 512

SEQ ID NO: 529 - protein, 108 aa, Homo sapiens
DIQMTQSPSSLSASVGDRVTITCRASQNINFWLRWYQQKPGKAPTLLIYDASRTQSGVPSRFSGSGSGTDFTLTISSLQPEDFATYYCQQDLMPPYTFGQGTKVEIKR

SEQ ID NO: 530 - protein, 108 aa, Homo sapiens
DIQMTQSPSSLSASVGDRVTITCRASQNINFWLRWYQQKPGKAPTLLIYDASAPNNGAPSRFSGSGSGTDFTLTISSLQPEDFATYYCQQDFHLPFTFGQGTKVEIKR

SEQ ID NO: 531 - protein, 108 aa, Homo sapiens
DIQMTQSPSSLSASVGDRVTITCRASQNINFWLRWYQQKPGKAPTLLIYDASAPNNGVPSRFSGSGSGTDFTLTISSLQPEDFATYYCQQDFMFPLTFGQGTKVEIKR

SEQ ID NO: 532 - protein, 108 aa, Homo sapiens
DIQMTQSPSSLSASVGDRVTITCRASQNINFWLRWYQQKPGKAPTLLIYDASAPNNGVPSRFSGSGSGTDFTLTISSLQPEDFATYYCQQDFSQPFTFGQGTKVEIKR

SEQ ID NO: 533 - protein, 108 aa, Homo sapiens
DIQMTQSPSSLSASVGDRVTITCRASQNINFWLRWYQQKPGKAPTLLIYDASAPNNGVPSRFSGSGSGTDFTLTISSLQPEDFATYYCQQDLMPPYTFGQGTKVEIKR

SEQ ID NO: 534 - protein, 108 aa, Homo sapiens
  VARIANT 106: Xaa = Any Amino Acid
DIQMTQSPSSLSASVGDRVTITCRASQNINFWLRWYQQKPGKAPTLLIYDASRTQSGVPSRFSGSGSGTDFTLTISSLQPEDFATYYCQQDFMNPFTFGQGTKVEXKR

SEQ ID NO: 535 - protein, 108 aa, Homo sapiens
DIQMTQSPSSLSASVGDRVTITCRASQNINFWLRWYQQKPGKAPTLLIYDASRTQSGVPSRFSGSGSGTDFTLTISSLQPEDFATYYCQQDFHLPFTFGQGTKVEIKR

SEQ ID NO: 536 - protein, 108 aa, Homo sapiens
DIQMTQSPSSLSASVGDRVTITCRASQNINFWLRWYQQKPGKAPTLLIYDASRTQSGVPSRFSGSGSGTDFTLTISSLQPEDFATYYCQQDFMFPLTFGQGTKVEIKR

SEQ ID NO: 537 - protein, 108 aa, Homo sapiens
DIQMTQSPSSLSASVGDRVTITCRASQNINFWLRWYQQKPGKAPTLLIYDASRTQSGVPSRFSGSGSGTDFTLTISSLQPEDFATYYCQQDFSQPFTFGQGAKVEIKR

SEQ ID NO: 538 - protein, 108 aa, Homo sapiens
  VARIANT 106: Xaa = Any Amino Acid
DIQMTQSPSSLSASVGDRVTITCRASQNINFWLRWYQQKPGKAPTLLIYDASAPNNGVPSRFSGSGSGTDFTLTISSLQPEDFATYYCQQDFMNPFTFGQGTKVEXKR

SEQ ID NO: 539 - protein, 108 aa, Homo sapiens
  VARIANT 106: Xaa = Any Amino Acid
DIQMTQSPSSLSASVGDRVTITCRASQNINFWLRWYQQKPGKAPTLLIYDASQPQSGVPSRFSGSGSGTDFTLTISSLQPEDFATYYCQQDFMNPFTFGQGTKVEXKR

SEQ ID NO: 540 - protein, 108 aa, Homo sapiens
DIQMTQSPSSLSASVGDRVTITCRASQNINFWLRWYQQKPGKAPTLLIYDASQPQSGDPSRFSGSGSGTDFTLTISSLQPEDFATYYCQQDFHLPFTFGQGTKVEIKR

SEQ ID NO: 541 - protein, 108 aa, Homo sapiens
DIQMTQSPSSLSASVGDRVTITCRASQNINFWLRWYQQKPGKAPTLLIYDASQPQSGVPSRFSGSGSGTDFTLTISSLQPEDFATYYCQQDFMFPLTFGQGTKVEIKR

SEQ ID NO: 542 - protein, 108 aa, Homo sapiens
DIQMTQSPSSLSASVGDRVTITCRASQNINFWLRWYQQKPGKAPTLLIYDASQPQSGVPSRFSGSGSGTDFTLTISSLQPEDFATYYCQQDFSQPFTFGQGTKVEIKR

SEQ ID NO: 543 - protein, 108 aa, Homo sapiens
DIQMTQSPSSLSASVGDRVTITCRASQNINFWLRWYQQKPGKAPTLLIYDASQPQSGVPSRFSGSGSGTDFTLTISSLQPEDFATYYCQQDLMPPYTFGQGTKVEIKR

SEQ ID NO: 544 - protein, 108 aa, Homo sapiens
  VARIANT 106: Xaa = Any Amino Acid
DIQMTQSPSSLSASVGDRVTITCRASQSINFWLRWYQQKPGKAPTLLIYDASRTQSGVPSRFSGSGSGTDFTLTISSLQPEDFATYYCQQDFMNPFTFGQGTKVEXKR

SEQ ID NO: 545 - protein, 108 aa, Homo sapiens
DIQMTQSPSSLSASVGDRVTITCRASQSINFWLRWYQQKPGKAPTLLIYDASRTQSGVPSRFSGSGSGTDFTLTISSLQPEDFATYYCQQDFHLPFTFGQGTKVEIKR

SEQ ID NO: 546 - protein, 108 aa, Homo sapiens
DIQMTQSPSSLSASVGDRVTITCRASQSINFWLRWYQQKPGKAPTLLIYDASRTQSGVPSRFSGSGSGTDFTLTISSLQPEDFATYYCQQDFMFPLTFGQGTKVEIKR

SEQ ID NO: 547 - protein, 108 aa, Homo sapiens
DIQMTQSPSSLSASVGDRVTITCRASQSINFWLRWYQQKPGKAPTLLIYDASRTQSGVPSRFSGSGSGTDFTLTISSLQPEDFATYYCQQDFSQPFTFGQGTKVEIKR

SEQ ID NO: 548 - protein, 108 aa, Homo sapiens
DIQMTQSPSSLSASVGDRVTITCRASQSINFWLRWYQQKPGKAPTLLIYDASRTQSGVPSRFSGSGSGTDFTLTISSLQPEDFATYYCQQDLMPPYTFGQGTKVEIKR

SEQ ID NO: 549 - protein, 108 aa, Homo sapiens
DIQMTQSPSSLSASVGDRVTITCHASQNINFWLRWYQQKPGKAPTLLIYDASRSQSGVPSRFSGSGSGTDFTLTISSLQPEDFATYYCQQDLMPPYTFGQGTKVEIKR

SEQ ID NO: 550 - protein, 108 aa, Homo sapiens
DIQMTQFPSSLSASVGDRVTITCTTDQNINFWLRWYQQKPGKAPTLLIYDASRSQSGVPSRFSGSGSGTDFTLTISSLQPEDFATYYCQQDLMPPYTFGQGTKVEIKR

SEQ ID NO: 551 - protein, 108 aa, Homo sapiens
DIQMTQSPSSLSASVGDRVTITCAASQNTNFWLRWYQQKPGKAPTLLIYDASRSQSGVPSRFSGSGSGTDFTLTISSLQPEDFATYYCQQDLMPPYTFGQGTKVEIKR

SEQ ID NO: 552 - protein, 108 aa, Homo sapiens
DIQMTQSPSSLSASVGDRVTITCNTTQNINFWLRWYQQKPGKAPKLLIYDASRSQSGVPSRFSGSGSGTDFTLTISSLQPEDFATYYCQQDLMPPYTFGQGTKVEIKR

SEQ ID NO: 553 - protein, 108 aa, Homo sapiens
DIQMTQSPSSLSASVGDRVTITCRASTSINFWLRWYQQKPGKAPTLLIYDASRSQSGVPSRFSGSGSGTDFTLTISSLQPEDFATYYCQQDLMPPYTFGQGTKVEIKR

SEQ ID NO: 554 - protein, 108 aa, Homo sapiens
DIQMTQSPSSLSASVGDRVTITCRASLPLNFWLRWYQQKPGKAPTLLIYDASRSQSGVPSRFSGSGSGTDFTLTISSLQPEDFATYYCQQDLMPPYTFGHGTKVEIKR

SEQ ID NO: 555 - protein, 108 aa, Homo sapiens
DIQMTQSPSSLSASVGDRVTITCFLSQNINFWLRWYQQKPGKAPTLLIYDASRSQSGVPSRFSGSGSGTDFTLTISSLQPEDFATYYCQQDLMPPYTFGQGTKVEIKR

SEQ ID NO: 556 - protein, 108 aa, Homo sapiens
DIQMTQSPSSLSASVGDRVTITCTTTQNINFWLRWYQQKPGKAPTLLIYDASRSQSGVPSRFSGSGSGTDFTLTISSLQPEDFATYYCQQDLMPPYTFGQGTKVEIKR

SEQ ID NO: 557 - protein, 108 aa, Homo sapiens
DIQMTQSPSSLSASVGDRVTITCRPNQNINFWLRWYQQKPGKAPTLLIYDASRSQSGVPSRFSGSGSGTDFTLTISSLQPEDFATYYCQQDLMPPYTFGQGTKVEIKR

SEQ ID NO: 558 - protein, 108 aa, Homo sapiens
DIQMTQSPSSLSASVGDRVTITCHTTQNINFWLRWYQQKPGKAPTLLIYDASRSQSGVPSRFSGSGSGTDFTLTISSLQPEDFATYYCQQDLMPPYTFGQGTKVEIKR

SEQ ID NO: 559 - protein, 108 aa, Homo sapiens
DIQMTQSPSSLSASVGDRVTITCVWGQNINFWLRWYQQKPGKAPTLLIYDASRSQSGVPSRFSGSGSGTDFTLTISSLQPEDFATYYCQQDLMPPYTFGQGTKVEIKR

SEQ ID NO: 560 - protein, 108 aa, Homo sapiens
DIQMTQSPSSLSASVGDRVTITCHSTQNINFWLRWYQQKPGKAPTLLIYDASRSQSGVPSRFSGSGSGTDFTLTISSLQPEDFATYYCQQDLMPPYTFGQGTKVEIKR

SEQ ID NO: 561 - protein, 108 aa, Homo sapiens
DIQMTQSPSSLSASVGDRVTITCRASTPTNFWLRWYRQKPGKAPTLLIYDASRSQSGVPSRFSGSGSGTDFTLTISSLQPEDFATYYCQQDLMPPYTFGQGTKVEIKR

SEQ ID NO: 562 - protein, 108 aa, Homo sapiens
DIQMTQSPSSLSASVGDRVTITCNINQNINFWLRWYQQKPGKAPTLLIYDASRSQSGVPSRFSGSGSGTDFTLTISSLQPEDFATYYCQQDLMPPYTFGQGTKVEIKR

SEQ ID NO: 563 - protein, 108 aa, Homo sapiens
DIQMTQSPSSLSASVGDRVTITCRPTQNINFWLRWYQQKPGKAPTLLIYDASRSQSGVPSRFSGSGSGTDFTLTISSLQPEDFATYYCQQDLMPPYTFGQGTKVEIKR

SEQ ID NO: 564 - protein, 108 aa, Homo sapiens
DIQMTQSPSSLSASVGDRVTITCRASLSINFWLRWYQQKPGKAPTLLIYDASRSQSGVPSRFSGSGSGTDFTLTISSLQPEDFATYYCQQDLMPPYTFGQGTKVEIKR

SEQ ID NO: 565 - protein, 108 aa, Homo sapiens
DIQMTQSPSSLSASVGDRVTITCRASSLLNFWLRWYQQKPGKAPTLLIYDASRSQSGVPSRFSGSGSGTDFTLTISSLQPEDFATYYCQQDLMPPYTFGQGTKVEIKR

SEQ ID NO: 566 - protein, 108 aa, Homo sapiens
  VARIANT 92, 93: Xaa = Any Amino Acid
DIQMTQSPSSLSASVGDRVTITCRASGELNFWLRWYQQKPGKAPTLLIYDASRSQSGVPSRFSGSGSGTDFTLTISSLQPEDFATYYCQQDXXVPFTFGQGTKVEIKR

SEQ ID NO: 567 - protein, 108 aa, Homo sapiens
DIQMTQSPSSLSASVGDRVTITCNTNQNINFWLRWYQQKPGKAPTLLIYDASRSQSGVPSRFSGSGSGTDFTLTISSLQPEDFATYYCQQDLMPPYTFGQGTKVEIKR

SEQ ID NO: 568 - protein, 108 aa, Homo sapiens
DIQMTQSPSSLSASVGDRVTITCRASKSVNFWLRWYQQKPGKAPTLLIYDASRSQSGVPSRFSGSGSGTDFTLTISSLQPEDFATYYCQQDLMPPYTFGQGTKVEIKR

SEQ ID NO: 569 - protein, 108 aa, Homo sapiens; identical to SEQ ID NO: 563

SEQ ID NO: 570 - protein, 108 aa, Homo sapiens
DIQMTQSPSSLSASVGDRVTITCNTKQNINFWLRWYQQKPGKAPTLLIDDASRSQSGVPSRFSGSGSGTDFTLTISSLQPEDFATYYCQQDLVPPYTFGQGTKVEIKR

SEQ ID NO: 571 - protein, 108 aa, Homo sapiens; identical to SEQ ID NO: 555

SEQ ID NO: 572 - protein, 108 aa, Homo sapiens
DIQMTQSPSSLSASVGDRVTITCRTGQNINFWLRWYQQKPGKAPTLLIDDASRSQSGVPSRFSGSGSGTDFTLTISSLQPEDFATYYCQQDLMPPYTFGQGTKVEIKR

SEQ ID NO: 573 - protein, 108 aa, Homo sapiens
DIQMTQSPSSLSASVGDRVTITCRASWSINFWLRWYQQKPGKAPTLLIYDASRSQSGVPSRFSGSGSGTDFTLTISSLQPEDFATYYCQQDLMPPYTFGQGTKVEIKR

SEQ ID NO: 574 - protein, 108 aa, Homo sapiens
DIQMTQSPSSLSASVGDRVTITCRASSPLNFWLRWYQQKPGKAPTLLIYDASRSQSGVPSRFSGSGSGTDFTLTINSLQPEDFATYYCQQDLMPPYTFGQGTKVEIKR

SEQ ID NO: 575 - protein, 108 aa, Homo sapiens
DIQMTQSPSSLSASVGDRVTITCRTSSPINFWLRWYQQKPGKAPTLLIYDASRSQSGVPSRFSGSGSGTDFTLTISSLQPEDFATYYCQQDLMPPYTFGQGTKVEIKR

SEQ ID NO: 576 - protein, 108 aa, Homo sapiens
DIQMTQSPSSLSASVGDRVTITCRASQWIGPYLNWYQQKPGKAPKPLIYMASYLPSGAPSRFSGSGSGTDFTLTISSLQPEDFATYYCQQDLYPPFTFGQGTKVEIKR

SEQ ID NO: 577 - protein, 108 aa, Homo sapiens
DIQMTQSPSSLSASVGDRVTITCRASQKIGPYLQWYQQKPGKAPKLLIYSASVLQSGVPSRFSGSGSGTVFTLTISSLQPEDFATYYCQQGINPPRTFGQGTKVEIKR

SEQ ID NO: 578 - protein, 108 aa, Homo sapiens
DIQMTQSPSSLSASVGDRVTITCRASQWIGPYLNWYQQKPGKAPKPLIYMGWHYPSGVPSRFSGSGSGTDFTLTISSLQPEDFATYYCQQDLYPPFTFGQGTKVEIKR

SEQ ID NO: 579 - protein, 108 aa, Homo sapiens
DIQMTQSPSSLSASVGDRVTITCRASQWIGPYLNWYQQKPGKAPKPLIYMGSHNVEGVPSRFSGSGSGTDFTLTISSLQPEDFATYYCQQDLYPPFTFGQGTKVEIKR

SEQ ID NO: 580 - protein, 108 aa, Homo sapiens
DIQMTQSPSSLSASVGDRVTITCRASQWIGPYLNWYQQKPGKAPKPLIYSSWYLPSGVPSRFSGSGSGTDFTLTISSLQPEDFATYYCQQDLYPPFTFGQGTKVEIKR

SEQ ID NO: 581 - protein, 108 aa, Homo sapiens
DIQMTQSPSSLSASVGDRVTITCRASQWIGPYLNWYQQKPGKAPKPLIYMGSYKGRGVPSRFSGSGSGTDFTLTISSLQPEDFATYYCQQDLYPPFTFGQGTKVEIKR

SEQ ID NO: 582 - protein, 108 aa, Homo sapiens
DIQMTQSPSSLSASVGDRVTITCRAGQNINFWLRWYQQKPGKAPALLIYDASESQSGVPSRFSGSGSGTDFTLTISSLQPEDFATYYCQQDLMPPYTFGQGTKVEIKR

SEQ ID NO: 583 - protein, 108 aa, Homo sapiens
DIQMTQSPSSLSASVGDRVTITCRASQNSNFWLRWYQQKPGKAPTLLIYDASRSGSGVPSRFSGSGSGTDFTLTISSLQPEDFATYYCQQDLMPPYTFGQGTKVEIKR

SEQ ID NO: 584 - protein, 108 aa, Homo sapiens
DIQMTQSPSSLSASVGDRVTITCRASQNINFWLRWYQQKPGKAPTLLIYDASRSQPGVPSRFSGSGSGTDFTLTISSLQPEDFATYYCQQDLMPPYTFGQGTKVEIKR

SEQ ID NO: 585 - protein, 108 aa, Homo sapiens
DIQMTQSPSSLSASVGDRVTITCRASQNINFWLRWYQQKPGKAPTLLIYDASRSQGGVPSRFSGSGSGTDFTLTISSLQPEDFATYYCQQDLMPPYTFGQGTKVEIKR

SEQ ID NO: 586 - protein, 108 aa, Homo sapiens
DIQMTQSPSSLSASVGDRVTITCRASQNINFWLRWYQQKPGKAPTLLIYDASRSQSGVPSRFSGSGSGTDFTLTISSLQPEDFATYYCQQDLRPPYTFGQGTKVEIKR

SEQ ID NO: 587 - protein, 108 aa, Homo sapiens
DIQMTQSPSSLSASVGDRVTITCRASQNINFWLRWYQQKPGKAPTLLIYDASRSQSGVPSRFSGSGSGTDFTLTISSLQPEDFATYYCQQDLWPPYTFGQGTKVEIKR

SEQ ID NO: 588 - protein, 108 aa, Homo sapiens
DIQMTQSPSSLSASVGDRVTITCRASQNINFWLRWYQQKPGKAPTLLIYDASRSQSGVPSRFSGSGSGTDFTLTISSLQPEDFATYYCQQDLEPPYTFGQGTKVEIKR

SEQ ID NO: 589 - protein, 108 aa, Homo sapiens; identical to SEQ ID NO: 586

SEQ ID NO: 590 - protein, 108 aa, Homo sapiens
DIQMTQSPSSLSASVGDRVTITCRASQNINFWLRWYQQKPGKAPTLLIYDASRSQSGVPSRFSGSGSGTDFTLTISSLQPEDFATYYCQQDLTPPYTFGQGTKVEIKR

SEQ ID NO: 591 - protein, 108 aa, Homo sapiens
DIQMTQSPSSLSASVGDRVTITCRASQNINFWLRWYQQKPGKAPTLLIYDASRSQSGVPSRFSGSGSGTDFTLTISSLQPEDFATYYCQQDLGPPYTFGQGTKVEIKR

SEQ ID NO: 592 - protein, 108 aa, Homo sapiens
DIQMTQSPSSLSASVGDRVTITCRASQNINFWLRWYQQKPGKAPTLLIYDASRSQSGVPSRFSGSGSGTDFTLTISSLQPEDFATYYCQQDLCPPYTFGQGTKVEIKR

SEQ ID NO: 593 - protein, 108 aa, Homo sapiens
DIQMTQSPSSLSASVGDRVTITCRASQNINFWLRWYQQKPGKAPTLLIYDASRSQSGVPSRFSGSGSGTDFTLTISSLQPEDFATYYCQQDLMPPSTFGQGTKVEIKR

SEQ ID NO: 594 - protein, 108 aa, Homo sapiens
DIQMTQSPSSLSASVGDRVTITCRASQMIEWHLDWYQQKPGKAPRLLIYDISKLQSGVPSRFSGSGSGTDFTLTISSLQPEDFATYYCQQYEIPPVTFGQGTKVEIKR

SEQ ID NO: 595 - protein, 108 aa, Homo sapiens
DIQMTQSPSSLSASVGDRVTITCRTSQDINSWLNWYQQKPGKAPKLLIYLASSLQSGVPPRFSGSGSGTDFTLTISSLQPEDFATYYCQQYMLEPYTFGQGTKVEIKR

SEQ ID NO: 596 - protein, 108 aa, Homo sapiens
DIQMTQSPSSLSASVGDRVTITCRASQDIGEYLAWYQQKPGKAPKLLIYYISRLQSGVPSRFSGSGSGTDFTLTISSLQPEDFATYYCQQLMDFPFTFGQGTKVEIKR

SEQ ID NO: 597 - protein, 108 aa, Homo sapiens
DIQMTQSPSSLSASVGDRVTITCRASQDIGDWLGWYQQKPGKAPKLLIYLGSMLQSGVPSRFSGSGSGTDFTLTISSLQPEDFATYYCQQFNVMPFTFGQGTKVEIKR

SEQ ID NO: 598 - protein, 108 aa, Homo sapiens
DIQMTQSPSSLSASVGDRVTITCRASRRIVDMLDWYQQKPGKAPKLLIAGGSVLQSGVPSRFSGSGSGTDFTLTISSLQPEDFATYYCGQYAAYPPTFGQGTKVEIKR

SEQ ID NO: 599 - protein, 108 aa, Homo sapiens
DIQMTQSPSSLSASVGDRVTITCRASRYIADGLDWYQQKPGKAPMLLIVGGSGLQSGVPSRFSGSGSGTDFTLTISSLQPEDFATYYCAQWWEYPATFGQGTKVEIKR

SEQ ID NO: 600 - protein, 108 aa, Homo sapiens
DIQMTQSPSSLSASVGDRVTITCRASTNIWTHLDWYQQKPGKAPKLLIAGVSRLQSGVPSRFSGSGSGTDFTLTISSLQPEDFATYYCAQFAGYPVTFGQGTKVEIKR

SEQ ID NO: 601 - protein, 108 aa, Homo sapiens
DIQMTQSPSSLSASVGDRVTITCRASRNIDIMLDWYQQKPGKAPKLLIGSGSGLQSGVPSRFSGSGSGTDFTLTISSLQPEDFATYYCGQYAAYPPTFGQGTKVEIKR

SEQ ID NO: 602 - protein, 108 aa, Homo sapiens
DIQMTQSPSSLSASVGDRVTITCRASLDIGDWLHWYQQKPGKAPKLLIGWGSGLQSGVPSRFSGSGSGTDFTLTISSLQPEDFATYYCLQEGLGPPTFGQGTKVEIKR

SEQ ID NO: 603 - protein, 108 aa, Homo sapiens
DIQMTQSPSSLSASVGDRVTITCRASLDIGDWLHWYQQKPGKAPKLLIGWGSGLQSGVPSRFSGSGSGTDFTLTISSLQPEDFATYYCLQEGWGPPTFGQGTKVEIKR

SEQ ID NO: 604 - protein, 108 aa, Homo sapiens
DIQMTQSPSSLSASVGDRVTITCRASLDIGDWLHWYQQKPGKAPKLLIAWASLLPSGVPSRFSGSGSGTDFTLTISSLQPEDFATYYCLQEGWGPPTFGQGTKVEIKR

SEQ ID NO: 605 - protein, 108 aa, Homo sapiens
DIQMTQSPSSLSASVGDRVTITCRASLDIGDWLHWYQQKPGKAPKLLIAWASTLDSGVPSRFSGSGSGTDFTLTISSLQPEDFATYYCLQEGWGPPTFGQGTKVEIKR

SEQ ID NO: 606 - protein, 108 aa, Homo sapiens
DIQMTQSPSSLSASVGDRVTITCRASLDIGDWLHWYQQKPGKAPKLLIPWASGLWSGVPSRFSGSGSGTDFTLTISSLQPEDFATYYCLQEGWGPPTFGQGTKVEIKR

SEQ ID NO: 607 - protein, 108 aa, Homo sapiens
DIQMTQSPSSLSASVGDRVTITCRASLDIGDWLHWYQQKPGEAPKLLISWASTLPSGVPSRFSGSGSGTDFTLTISSLQPEDFATYYCLQEGWGPPTFGQGTKVEIKR

SEQ ID NO: 608 - protein, 108 aa, Homo sapiens
DIQMTQSPSSLSASVGDRVTITCRASRNIGDWLHWYQQKPGKAPKLLIAWASTLDSGVPSRFSGSGSGTDFTLTISSLQPEDFATYYCLQEGWGPPTFGQGTKVEIKR

SEQ ID NO: 609 - protein, 108 aa, Homo sapiens
DIQMTQSPSSLSASVGDRVTITCRASLDIGDWLHWYQQKPGKAPKLLISWASTLDSGVPSRFSGSGSGTDFTLTISSLQPEDFATYYCLQEGWGPPTFGQGTKVEIKR

SEQ ID NO: 610 - protein, 108 aa, Homo sapiens
DIQMTQSPSSLSASVGDRVTITCRASLDIGDWLHWYQQKPGKAPKLLISWASTLPSGVPSRFSGSGSGTDFTLTISSLQPEDFATYYCLQEGWGPPTFGQGTKVEIKR

SEQ ID NO: 611 - protein, 108 aa, Homo sapiens
DIQMTQSPSSLSASVGDRVTITCRASRSIGDWLHWYQQKPGKAPKLLIAWASTLDSGVPSRFSGSGSGTDFTLTISSLQPEDFATYYCLQEGWGPPTFGQGTKVEIKR

SEQ ID NO: 612 - protein, 108 aa, Homo sapiens
DIQMTQSPSSLSASVGDRVTITCRASRPIADWLHWYQQKPGKAPKLLIAWASTLDSGVPSRFSGSGSGTDFTLTISSLQPEDFATYYCLQEGWGPPTFGQGTKVEIKR

SEQ ID NO: 613 - protein, 108 aa, Homo sapiens; identical to SEQ ID NO: 610

SEQ ID NO: 614 - protein, 108 aa, Homo sapiens
DIQMTQSPSSLSASVGDRVTITCRASRAISDWLHWYQQKPGKAPKLLIAWASTLDSGVPSRFSGSGSGTDFTLTISSLQPEDFATYYCLQEGWGPPTFGQGTKVEIKR

SEQ ID NO: 615 - protein, 108 aa, Homo sapiens
DIQMTQSPSSLSASVGDRVTITCRASAPISDWLHWYQQKPGKAPKLLIAWASTLDSGVPSRFSGSGSGTDFTLTISSLQPEDFATYYCLQEGWGPPTFGQGTKVEIKR

SEQ ID NO: 616 - protein, 108 aa, Homo sapiens
DIQMTQSPSSLSASVGDRVTITCRASHPIGDWLHWYQQKPGKAPKLLIAWASTLDSGVPSRFSGSGSGTDFTLTISSLQPEDFATYYCLQEGWGPPTFGQGTKVEIKR

SEQ ID NO: 617 - protein, 108 aa, Homo sapiens
DIQMTQSPSSLSASVGDRVTITCRASRPISDWLHWYQQKPGKAPKLLIAWASTLDSGVPSRFSGSGSGTDFTLTISSLQPEDFATYYCLQEGWGPPTFGQGTKVEIKR

SEQ ID NO: 618 - protein, 108 aa, Homo sapiens
  VARIANT 36: Xaa = Any Amino Acid
DIQMTQSPSSLSASVGDRVTITCRASLDIGDWLHWXQQKPGKAPQLLIAWASTSDSGVPSRFSGSGSGTDFTLTISSLQPEDFATYYCLQEGWGPPTFGQGTKVEIKR

SEQ ID NO: 619 - protein, 108 aa, Homo sapiens
  VARIANT 36: Xaa = Any Amino Acid
DIQMTQSPSSLSASVGDRVTITCRASLDIRDWLHWXQQKPGKAPKLLIAWASTLDSGVPSRFSGSGSGTDFTLTISSLQPEDFATYYCLQEGWGPPTFGQGTKVEIKR

SEQ ID NO: 620 - protein, 108 aa, Homo sapiens
DIQMTQSPSSLSASVGDRVTITCRASRPISDWLHWYQQKPGKAPKLLIAWASTLDSGVPSRFSGRGSGTDFTLTISSLQPEDFATYYCLQEWWGPPTFGQGTKVEIKR

SEQ ID NO: 621 - protein, 108 aa, Homo sapiens
DIQMTQSPSSLSASVGDRVTITCRASRPISDWLHWYQQKPGKAPKLLIAWASTLDSGVPSRFSGSGSGTDFTLTISSLQPEDFATYYCLQSGWGPPTFGQGTKVEIKR

SEQ ID NO: 622 - protein, 108 aa, Homo sapiens
DIQMTQSPSSLSASVGDRVTITCRASRPISDWLHWYQQKPGKAPRLLIYTASRSQSGVPSRFSGSGSGTDFTLTISSLQPEDFATYYCLQEGWKPPTFGQGTKVEIKR

SEQ ID NO: 623 - protein, 108 aa, Homo sapiens
DIQMTQSPSSLSASVGDRVTITCRASRGISDWLHWYQQKPGKAPKLLIAWASTLDSGVPSRFSGSGSGTDFTLTISSLQPEDFATYYCLQEGWGPPTFGQGTKVEIKR

SEQ ID NO: 624 - protein, 108 aa, Homo sapiens
DIQMTQSPSSLSASVGDRVTITCRASRNISDWLHWYQQKPGKAPKLLIAWASTLDSGVPSRFSGSGSGTDFTLTISSLQPEDFATYYCLQEGWGPPTFGQGTKVEIKR

SEQ ID NO: 625 - protein, 108 aa, Homo sapiens
DIQMTQSPSSLSASVGDRVTITCRASRNISDWLHWYQQKPGKAPRLLIAWASTLDSGVPSRFSGSGSGTDFTLTISSLQPEDFATYYCLQEGWGPPTFGQGTKVEIKR

SEQ ID NO: 626 - protein, 108 aa, Homo sapiens
DIQMTQSPSSLSASVGDRVTITCRASRKISDWLHWYQQKPGKAPKLLIAWASTLDSGVPSRFSGSGSGTDFTLTISSLQPEDFATYYCLQEGWGPPTFGQGTKVEIKR

SEQ ID NO: 627 - protein, 108 aa, Homo sapiens
DIQMTQSPSSLSASVGDRVTITCRASEPISDWLHWYQQKPGKAPKLLIAWASTLDSGVPSRFSGSGSGTDFTLTISSLQPEDFATYYCLQEGWGPPTFGQGTKVETKR

SEQ ID NO: 628 - protein, 108 aa, Homo sapiens
DIQMTQSPSSLSASVGDRVTITCRASRPISDWLHWYQQKPGKAPKLLIAWASVLDSGVPSRFSGSGSGTDFTLTISSLQPEDFATYYCLQEGWGPPTFGQGTKVEIKR

SEQ ID NO: 629 - protein, 108 aa, Homo sapiens
DIQMTQSPSSLSASVGDRVTITCRASRPISDWLHWYQQKPGKAPKLLIAWAPTLDSGVPSRFRGSGSGTDFTLTISSLQPEDFATYYCLQEGWGPPTFGQGTKVEIKR

SEQ ID NO: 630 - protein, 108 aa, Homo sapiens
DIQMTQSPSSLSASVGDRVTITCRASRPISDWLHWYQQKPGKAPKLLIAWASTLVSGVPSRFSGSGSGTDFTLTISSLQPEDFATYYCLQEGWGPPTFGQGTKVEIKR

SEQ ID NO: 631 - protein, 108 aa, Homo sapiens
DIQMTQSPSSLSASVGDRVTITCRASRPISDWLHWYQQKPGKAPKLLIAWASTLLSGVPSRFSGSGSGTDFTLTISSLQPEDFATYYCLQEGWGPPTFGQGTKVEIKR

SEQ ID NO: 632 - protein, 108 aa, Homo sapiens
DIQMTQSPSSLSASVGDRVTIACRASRPISDWLHWYQQKPGKAPKLLIAWASTLQSGVPSRFSGSGSGTDFTLTISSLHPEDFATYYCLQEGWGPPTFGQGTKVEIKR

SEQ ID NO: 633 - protein, 108 aa, Homo sapiens
  UNSURE 36: Xaa = unknown
DIQMTQSPSSLSASVGDRVTITCRASRPISDWLHWXQQKPGKAPKLLIAWASTLLNGVPSRFSGSGSGTDFTLTISSLQPEDFATYYCLQEGWGPPTFGQGTKVEIKR

SEQ ID NO: 634 - protein, 108 aa, Homo sapiens; identical to SEQ ID NO: 630

SEQ ID NO: 635 - protein, 108 aa, Homo sapiens
DIQMTQSPSSLSASVGDRVTITCRASRPISDWLHWYQQKPGKAPKLLIAWASTSDSGVPSRFSGSGSGTDFTLTISSLQPEDFATYYCLQEGWGPPTFGQGTKVEIKR

SEQ ID NO: 636 - protein, 108 aa, Homo sapiens
DIQMTQSPSSLSASVGDRVTITCRASRPISDWLHWYQQKPGKAPKLLIAWASTLDLGVPSRFSGSGSGTDFTLTISSLQPEDFATYYCLQEGWGPPTFGQGTKVEIKR

SEQ ID NO: 637 - protein, 108 aa, Homo sapiens
DIQMTQSPSSLSASVGDRVTITCRASRPISDWLHWYQQKPGKAPKLLIAWASTLDQGVPSRFSGSGSGTDFTLTISSLQPEDFATYYCLQEGWGPPTFGQGTKVEIKR

SEQ ID NO: 638 - protein, 108 aa, Homo sapiens
DIQMTQSPSSLSASVGDRVTITCRASRPISDWLHWYQQKPGKAPKLLIAWASTLDDGVPSRFSGSGSGTDFTLTISSLQPEDFATYYCLQEGWGPPTFGQGTKVEIKR

SEQ ID NO: 639 - protein, 108 aa, Homo sapiens
DIQMTQSPSSLSASVGDRVTITCRASRPISDWLHWYQQKPGKAPKLLIAWASTLDHGVPSRFSGSGSGTDFTLTISSLQPEDFATYYCLQEGWGPPTFGQGTKVEIKR

SEQ ID NO: 640 - protein, 108 aa, Homo sapiens
DIQMTQSPSSLSASVGDRVTITCRASRPISDWLHWYQQKPGKAPKLLIAWASTLDSGVPSRFSGSGSGTDFTLTISSLQPEDFAAYYCLQEGWGPPTFGQGTKVEIKR

SEQ ID NO: 641 - protein, 108 aa, Homo sapiens
DIQMTQSPSSLPASVGDRVTITCRASLDIGDWLHWYQQKPGKAPKLLIAWASTLDSGVPSRFSGSGSGTDFTLTISSLQPEDFATYYCLQEGWGPPTFGQGTKVEIKR

SEQ ID NO: 642 - protein, 108 aa, Homo sapiens
DIQMTQSPSSLSASVGDRVTITCRASLDIGDWLHWYQQKPGKDPKLLIAWASTLDSGVPSRFSGSGSGTDFTLTISSLQPEDFATYYCLQEGWGPPTFGQGTKVEIKR

SEQ ID NO: 643 - protein, 108 aa, Homo sapiens
DIQMTQSPSSLSASVGDRVTITCRASLDIGDWLHWYQQKPGKAPKLLIAWASTLDSGVPSRFSGSGSGTDFTLTISSLQPEDFATYYCLQSGWGPPTFGQGTKVEIKR

SEQ ID NO: 644 - protein, 108 aa, Homo sapiens
DIQMTQSPSSLPASVGDRVTITCRASRPISDWLHWYQQKPGKAPKLLIAWASTLDSGVPSRFSGSGSGTDFTLTISSLQPEDFATYYCLQEGWGPPTFGQGTKVEIKR

SEQ ID NO: 645 - protein, 108 aa, Homo sapiens
DIQMTQSPSSLSASVGDRVTITCRASRRIGNDLVWYQQKPGKAPKLLIGGGSRLQSGVPSRFSGSGSGTDFTLTISSLQPEDFATYYCVQLYRLPVTFGQGTKVEIKR

SEQ ID NO: 646 - protein, 108 aa, Homo sapiens
DIQMTQSPSSLSASVGDRVTITCRASTNIWGGLDWYQQKPGKAPKLLIGAVSELQSGVPSRFSGSGSGTDFTLTISSLQPEDFATYYCGQWAVYPPTFGQGTKVEIKR

SEQ ID NO: 647 - protein, 108 aa, Homo sapiens
DIQMTQSPSSLSASVGDRVTITCRASRQIWNMLDWYQQKPGKAPKLLIGGGSRLQSGVPSRFSGSGSGTDFTLTISSLQPEDFATYYCGQYAGYPATFGQGTKVEIKR

SEQ ID NO: 648 - protein, 108 aa, Homo sapiens
DIQMTQSPSSLSASVGDRVTITCRASTNIHDGLDWYQQKPGKAPKLLIFASSELQSGVPSRFSGSGSGTDFTLTISSLQPEDFATYYCGQWFSYPATFGQGTKVEIKR

SEQ ID NO: 649 - protein, 108 aa, Homo sapiens
DIQMTQSPSSLSASVGDRVTITCRASQVIDDDLSWYQQKPGKAPKLLIGVGSWLQSGVPSRFSGSGSGTDFTLTISSLQPEDFATYYCAQGAWVPVTFGQGTKVEIKR

SEQ ID NO: 650 - protein, 108 aa, Homo sapiens
DIQMTQSPSSLSASVGDRVTITCRASSPIDNQLLWYQQKPGKAPKLLIAGVSELQSGVPSRFSGSGSGTDFTLTISSLQPEDFATYYCVQVGRWPATFGQGTKVEIKR

SEQ ID NO: 651 - DNA, 354 bp, Homo sapiens
ggggtgcagctgttggagtctgggggaggcttggtacagcctggggggtccctgcgtctctcctgtgcagcctccggattcacctttgcttggtatgatatggggtgggcccgccaggctccagggaagggtctagagtgggtctcaagtattgatgattctggtacgcagacatactacgcagactccgtgaagggccggttcaccatctcccgcgacaattccaagaacacgctgtatctgcaaatgaacagcctgcgtgccgaggacaccgcggtatattactgtgcgacagcggagagggatgatacttttgactactggggtcagggaaccctggtcaccgtctcgagc

SEQ ID NO: 652 - DNA, 354 bp, Homo sapiens
ggggtgcagctgttggagtctgggggaggcttggtacagcctggggggtccctgcgtctctcctgtgcagcctccggattcacctttgcttggtatgatatggggtgggcccgccaggctccagggaagggtctagagtgggtctcaagtattgatgattctggtacgcagacatactacgcagactccgtgaagggccggttcaccatctcccgcgacaattccaagaagacgctgtatctgcaaatgaacagcctgcgtgccgaggacaccgcggtatattactgtgcgacagcggagagggatgatacttttgactactggggtcagggaaccctggtcaccgtctcgagc

SEQ ID NO: 653 - DNA, 354 bp, Homo sapiens
ggggtgcagctgttggagtctgggggaggcttggtacagcctggggggtccctgcgtctctcctgtgcagcctccggattcacctttgcttggtatgatatgggatgggcccgccaggctccagagaagggtctagagtgggtctcaagtattaatgattatggtacgcagacatactacgcagactccgtgaagggccggttcaccatctcccgcgacaattccaataacacgctgtatctgcaaatgaacagcctgcgtgccgaggacaccgcggtatattactgtgcgacagcggagagggatgatacttttgactactggggtcagggaaccctggtcaccgtctcgagc

SEQ ID NO: 654 - DNA, 354 bp, Homo sapiens
ggggtgcagctgttggagtctgggggaggcttggtacagcctggggggtccctgcgtctctcctgtgcagcctccggattcacctttgcttggtatgatatggggtgggcccgccaggctccagggaagggtctagagtgggtctcaagtatagatgattctggtacgcagacatactacgcagactccgtgaagggccggttcaccatctcccgcgacaattccaagaacacgctgtatctgcaaatgaacagcctgcgtgccgaggacaccgcggtatattactgtgcgacagcggagagggatgatacttatgactactggggtcagggaaccctggtcaccgtctcgagc

SEQ ID NO: 655 - DNA, 354 bp, Homo sapiens
ggggtgcagctgttggagtctgggggaggcttggtacagcctggggggtccctgcgtctctcctgtgcagcctccggattcacctttgcttggtatgatatggggtgggcccgccaggctccagggaagggtctagagtgggtctcaagtattgatgattctggtacgcatacgtactacgcagactccgtgaatggccggttcaccatctcccgcgacaattccaagaacacgctgtatctgcaaatgaacagcctgcgtgccgaggacaccgcggtatattactgtgcgacagcggagagggatgatacttttgactactggggtcagggaaccctggtcaccgttctgcga

SEQ ID NO: 656 - DNA, 354 bp, Homo sapiens
ggggtgcagctgttggagtctgggggaggcttggtacagcctggggggtccctgcgtctatcctgtgcagcctccggattcacctttgcttggtatgatatggggtgggcccgccaggctccagggaagggtctagagtgggtctcaagtattgatgattctggtacgcagacatactacgcagactccgtgatgggccggttcaccatctcccgcgacaattccaagaacacgctgtatctgcaaatgaacagcctgcgtgccgaggacaccgcggtatattactgtgcgacagcggagagggatgatacttttgactactggggtcagggaaccctggtcaccgtctcgagc

SEQ ID NO: 657 - DNA, 354 bp, Homo sapiens
ggggtgaagctgttggagtctgggggaggcttggtacagcctggggggtccctgcgtctctcctgtgcagcctccggattcacctttgcttggtatgatatggggtgggcccgccaggctccagggaagggtctagagtgggtctcaagtattgatgattctggtacgcagacatactacgcagactccgtgaagggccggttcaccatctcccgcgacaattccaagaacacgctgtatctgcaaatgaacagcctgcgtgccgaggacaccgcggtatattactgtgcgacagcggagagggatgatacttttgactactggggtcagggaaccctggtcaccgtctcgagc

SEQ ID NO: 658 - DNA, 354 bp, Homo sapiens
ggggcgcagctgttggagtctgggggaggcttggtacagcctggggggtccctgcgtctctcctgtgcagcctccggattcacctttgcttggtatgatatggggtgggcccgccaggctccagggaagggtctagagtgggtctcaagtattgatgattctggtacgcagacatactacgctgactccgtgaagggccggttcaccatctcacgcgacaattccaagaacacgctgtatctgcaaatgaacagcctgcgtgccgaggacaccgcggtatattactgtgcgacagcggagagggatgatacttttgactactggggtcagggaaccctggtcaccgtctcgagc

SEQ ID NO: 659 - DNA, 354 bp, Homo sapiens
ggggtgcagctgttggagtctgggggaggcttggtacagcctggggggtccctgcgtctctcctgtgcagcctccggattcacctttgcttggtatgatatggggtgggcccgccaggctccagggaagggtctagagtgggtctcaaagattaaggattatggtctggctacatactacgcagactccgtgaagggccgtttcaccatctcccgcgacaattccaagaacacgctgtatctgcaaatgaacagcctgcgtgccgaggacaccgcggtatattactgtgcgacagcggagagggatgatacttttgactactggggtcagggaaccctggtcaccgtcgcgagc

SEQ ID NO: 660 - DNA, 354 bp, Homo sapiens
ggggtgcagctgttggagtctgggggaggcttggtacagcctggggggtccctgcgtctctcctgtgcagcctccggattcacctttgcttggtatgatatggggtgggcccgccaggctccagggaagggtctagagtgggtctcaacgattgcgtggcttggtgatggtacatactacgcagactccgtgaagggccggttcaccatctcccgcgacaattccaagaacacgctgtatctgcaaatgaacagcctgcgtgccgaggacaccgcggtatattactgtgcgacagcggagagggatgatacttttgactactggggtcagggaaccctggtcaccgtctcgagc

SEQ ID NO: 661 - DNA, 354 bp, Homo sapiens
ggggtgcagctgttggagtctgggggaggcttggtacagcctggggggtccctgcgtctctcctgtgcagcctccggattcacctttgcttggtatgatatggggtgggtccgccaggctccagggaagggtctagagtgggtctcaactattgattgggttggtttggctacatactacgcagactccgtgaagggccggttcaccatctcccgcgacaattccaagaacacgctgtatctgcaaatgaacagcctgcgtgccgaggacaccgcggtatattactgtgcgacagcggagagggatgatacttttgactactggggtcagggaaccctggtcaccgtctcgagc

SEQ ID NO: 662 - DNA, 354 bp, Homo sapiens
ggggtgcagctgttggagtctgggggaggcttggtacagcctggggggtccctgcgtctctcctgtgcagcctccggattcacctttgcttggtatgatatggggtgggcccgccaggctccagggaagggtctagagtgggtctcagttattccgtgggttggtcctcttacatactacgcagactccgtgaagggccggttcaccatctcccgcgacaattccaagaacacgctgtatctgcaaatgaacagcctgcgtgccgaggacaccgcggtatattactgtgcgacagcggagagggatgatacttttgactactggggtcagggaaccctggtcaccgtctcgagc

SEQ ID NO: 663 - DNA, 354 bp, Homo sapiens
ggggtgcagctgttggagtctgggggaggcttggtacagcctggggggtccctgcgtctctcctgtgcagcctccggattcacctttgcttggtatgatatggggtgggcccgccaggctccagggaagggtctagagtgggtctcaactattactgattggggtttgtctacatactacgcagactccgtgaagggccggttcaccatctcccgcgacaattccaagaacacgctgtatctgcaaatgaacagcctgcgtgccgaggacaccgcggtatattactgtgcgacagcggagagggatgatacttttgactactggggtcagggaaccctggtcaccgtctcgagc

SEQ ID NO: 664 - DNA, 354 bp, Homo sapiens
ggggtgcagctgttggagtctgggggaggcttggtacagcctggggggtccctgcgtctctcctgtgcagcctccggattcacctttgcttggtatgatatggggtgggtccgccaggctccagggaagggtctagagtgggtctcagagattaattggtatggtgttgtgacatactacgcagactccgtgaagggccggttcaccatctcccgcgacaattccaagaacacgctgtatctgcaaatgaacagcctgcgtgccgaggacaccgcggtatattactgtgcgacagcggagagggatgatacttttgactactggggtcagggaaccctggtcaccgtctcgagc

SEQ ID NO: 665 - DNA, 354 bp, Homo sapiens
ggggtgcagctgttggagtctgggggaggcttggtacagcctggggggtccctgcgtctctcctgtgcagcctccggattcacctttgcttggtatgatatggggtgggcccgccaggctccagggaagggtctggagtgggtctcaattattactgattcgggttgggggacatactacgcagactccgtgaagggccggttcaccatctcccgcgacaattccaagaacacgctgtatctgcaaatgaacagcctgcgtgccgaggacaccgcggtatattactgtgcgacagcggagagggatgatacttttgactactggggtcagggaaccctggtcaccgtctcgagc

SEQ ID NO: 666 - DNA, 354 bp, Homo sapiens
ggggtgcagctgttggagtctgggggaggcttggtacagcctggggggtccctgcgtctctcctgtgcagcctccggattcacctttgcttggtatgatatggggtgggcccgccaggctccagggaagggtctagagtgggtctcacggattaaggattggggttgggctacatactacgcagactccgtgaagggccggttcaccatctcccgcgacaattccaagaacacgctgtatctgcaaatgaacagcctgcgtgccgaggacaccgcggtatattactgtgcgacagcggagagggatgatacttttgactactggggtcagggaaccctggtcaccgttctcgag

SEQ ID NO: 667 - DNA, 354 bp, Homo sapiens
ggggtgcagctgttggagtctgggggaggcttggtacagcctggggggtccctgcgtctctcctgtgcagcctccggattcacctttgcttggtatgatatggggtgggcccgccaggctccagggaagggtctagagtgggtctcattgattagtgatcttggttatgctacatactacgcagactccgtgaagggccggttcaccatctcccgcgacaattccaagaacacgctgtatctgcaaatgaacagcctgcgtgccgaggacaccgcggtatattactgtgcgacagcggagagggatgatacttttgactactggggtcagggaaccctggtcaccgtctcgagc

SEQ ID NO: 668 - DNA, 354 bp, Homo sapiens
ggggtgcagctgttggagtctgggggaggcttggtacagcctggggggtccctgcgtctctcctgtgcagcctccggattcacctttgcttggtatgatatggggtgggcccgccaggctccagggaagggtctagagtgggtctcacgtattaatgatattggttatgcgacatactacgcagactccgtgaagggccggttcaccatctcccgcgacaattccaagaacacgctgtatctgcaaatgaacagcctgcgtgccgaggacaccgcggtatattactgtgcgacagcggagagggatgatacttttgactactggggtcagggaaccctggtcaccgtctcgagc

SEQ ID NO: 669 - DNA, 354 bp, Homo sapiens
ggggtgcagctgttggagtctgggggaggcttggtacagcctggggggtccctgcgtctctcctgtgcagcctccggattcacctttgcttggtatgatatggggtgggcccgccaggctccagggaagggtctagagtgggtctcaaagattacgtggttgggtaatattacatactacgcagactccgtgaagggccggttcaccatctcccgcgacaattccaagaacacgctgtatctgcaaatgaacagcctgcgtgccgaggacaccgcggtatattactgtgcgacagcggagagggatgatacttttgactactggggtcagggaaccctggtcaccgtctcgagc

SEQ ID NO: 670 - DNA, 354 bp, Homo sapiens
ggggtgcagctgttggagtctgggggaggcttggtacagcctggggggtccctgcgtctctcctgtgcagcctccggattcacctttgcttggtatgatatggggtgggcccgccaggctccagggaagggtctagagtgggtctcagtgattaagtgggttggtgggagtacatactacgcagactccgtgaagggccggttcaccatctcccgcgacaattccaagaacacgctgtatctgcaaatgaacagcctgcgtgccgaggacaccgcggtatattactgtgcgacagcggagagggatgatacttttgactactggggtcagggaaccctggtcaccgtctcgagc

SEQ ID NO: 671 - DNA, 354 bp, Homo sapiens
  misc_feature 82, 106, 163, 267, 330, 346, 352: n = A,T,C or G
tgggtgcagctgttggagtctgggggaggcttggtacagcctggggggtccctgcgtctctcctgtgcagcctccggattcncctttgcttggtattatatggggngggcccgccaggctcctgggaagggtctggagtgggtctcagttattcgtgatgatngtaggggtacatactacgcagactccgtgaagggccggttcaccatctcccgcgacaattccaagaacacgctgaatctgcaaatgaacagcctgcgtgccgangacaccgcggtatattactgtgcgacagcggagagggatgatacttttgactactggggtcanggaaccctggtcaccnttcgcnag

SEQ ID NO: 672 - DNA, 354 bp, Homo sapiens
ggggtgcagctgttggagtctgggggaggcttggtacagcctggggggtccctgcgtctctcctgtgcagcctccggattcacctttgcttggtatgatatggggtgggtccgccaggctccagggaagggtctagagtgggtctcagtgattccgtggattggtcctcctacatactacgcagactccgtgaagggccggttcaccatctcccgcgacaattccaagaacacgctgtatctgcaaatgaacagcctgcgtgccgaggacaccgcggtatattactgtgcgacagcggagagggatgatacttttgactactggggtcagggaaccctggtcaccgtctcgagc

SEQ ID NO: 673 - DNA, 354 bp, Homo sapiens
ggggtgcagctgttggagtctgggggaggcttggtacagcctggggggtccctgcgtctctcctgtgcagcctccggattcacctttgcttggtatgatatggggtgggcccgccaggctccagggaagggtctagagtgggtctcacgtattacggattggggttatgcgacatactacgcagactccgtgaagggccggttcaccatctcccgcgacaactccaagaacacgctgtatctgcaaatgaacagcctgcgtgccgaggacaccgcggtatattactgtgcgacagcggagagggatgatacttttgactactggggtcagggaaccctggtcaccgtctcgagc

SEQ ID NO: 674 - DNA, 354 bp, Homo sapiens
ggggtgcagctgttggagtctgggggaggcttggtacagcctggggggtccctgcgtctctcctgtgcagcctccggattcacctttgcttggtatgatatggggtgggcccgccaggctccagggaagggtctagagtgggtctcagagatttgggataatggtcgttttacatactacgcggactccgtgaagggccggttcaccatctcccgcgacaattccaagaacacgctgtatctgcaaatgaacagcctgcgtgccgaggacaccgcggtatattactgtgcgacagcggagagggatgatacttttgactactggggtcagggaaccctggtcaccgtctcgagc

SEQ ID NO: 675 - DNA, 354 bp, Homo sapiens
ggggtgcagctgttggagtctgggggaggcttggtacagcctggggggtccctgcgtctctcctgtgcagcctccggattcacctttgcttggtatgatatggggtgggcccgccaggctccagggaagggtctagagtgggtctcaagtattgatgattctggtacgcagacatactacgcagactccgtgaagggccggttcaccatctcccgcgacaattccaagaacacgctgtatctggaaatgaacagcctacgtgccgaggacaccgcggtatattactgtgcgacagcggagagggatgatacttatgactactggggtcagggaaccctggtcaccgtctcgagc

SEQ ID NO: 676 - DNA, 354 bp, Homo sapiens
ggggtgcagctgttggagtctgggggaggcttggtacagcctggggggtccctgcgtctctcctgtgcagcctccggattcacctttgcttggtatgatatggggtgggcccgccaggctccagggaagggtctagagtgggtcacaagtattgatgattctggtacgcagacatactacgcagactccgtgaagggccggttcaccatctcccgcgacaattccaagaacacgctgtatctgcaaatgaacagcctgcgtgccgaggacaccgcggtatattactgtgcgacagcggagagggatgatacttatgactactggggtcagggaaccctggtcaccgtctcgagc

SEQ ID NO: 677 - DNA, 354 bp, Homo sapiens
ggggtgcagctgttggagtctgggggaggcttggtacagcctggggggtccctgcgtctctcctgtgcagcctccggattcacctttgcttggtatgatatggggtgggcccgccaggctccagggaagggtctagagtgggtctcaagtattgatgattctggtacgcatacatactacgcagactccgtgaagggccggttcaccatctcccgcgacaattccaagaacacgctgtatctgcaaatgaacagcctgcgtgccgaggacaccgcggtatattactgtgcgacagcggagagggatgatacttatgactactggggtcagggaaccctggtcaccgtctcgagc

SEQ ID NO: 678 - DNA, 354 bp, Homo sapiens
ggggtgcagctgttggagtctgggggaggcttggtacagcctggggggtccctgcgtctctcctgtgcagcctccggattcacctttgcttggtatgatatggggtgggcccgccaggctccggggaagggtctagagtgggtctcaagtattgatgattttggtacgcatacatactacgcagactccgtgaagggccggttcaccatctcccgcgacaattccaagaacacgctgtatctgcaaatgagcagcctgcgtgccgaggacaccgcggtatattactgtgcgacagcggagagggatgatacttttgacttctggggtcagggaaccctggtcaccgtctctagc

SEQ ID NO: 679 - DNA, 354 bp, Homo sapiens
ggggtgcagctgttggagtctgggggaggcttggtacagcctggggggtccctgcgtctctcctgtgcagcctccggattcacctttgcttggtatgatatggggtgggcccgccaggctccagggaagggtctagagtgggtctcaagtattgatgattctggtacgcagacatactacgcagactccgtgaagggccggttcaccatctcccgcgacaattccaagaacatgctgtatctgcaaatgaacagcctgcgtgccgaggacaccgcggtgtattactgtgcgacagcggagagggatgatacttatgactactggggtcagggaaccctggtcaccgtctcgagc

SEQ ID NO: 680 - DNA, 354 bp, Homo sapiens
ggggtgcagctgttggagtctgggggaggcttggtacagcctggggggtccctgcgtctctcctgtgcagcctccggattcacctttgcttggtatgatatggggtgggcccgccaggctccagggaagggtctagagtgggtctcaagtattgatgattctggtacgcagacatactacgcagactccgtgaagggccggttcaccatctcccgcgacaattccaagaacacgctgtatctgcaaatgaacagcctgcgtgccgaggacaccgcggtatattactgtgcggcagcggagtgggatgatacttttgactacaggggtcagggaaccctggtcatcgtctcgagc

SEQ ID NO: 681 - DNA, 354 bp, Homo sapiens
ggggtgcagctgttggagtctgggggaggcttggtacagcctggggggtccctgcgtctctcctgtgcagcctccggattcacctttgcttggtatgatatggggtgggcccgccaggctccagggaagggtctagagtgggtctcaagtattgatgattttggtacgcatacatactacgcagactccgtgaagggccggttcacaatctaccgcgacaattccaagaacacgctgtatctgcaaatgaacagcctgcgtgccgaggacaccgcggtatattactgtgcgacagcggagagggatgatacttttgactactggggtcagggaaccctggtcaccgtctcgagc

SEQ ID NO: 682 - DNA, 354 bp, Homo sapiens
ggggtgcagctgttggagtctgggggaggcttggtacagcctggggggtccctgcgtctctcctgtgcagcctccggattcacctttgcttggtatgatatggggtgggcccgtcaggctccagggaagggtctagagtgggtctcaagtattgatgattttggtacgcacacatactacgcagactccgtgaaggaccggttcaccatctcccgcgacaattccaagaacacgctgtatctgcaaatgaacaacctgcgtgccgaggacaccgcagtatattactgtgcgacagcggagagggatgatacttttgactactggggtcagggaaccctggtcaccgtctcgagc

SEQ ID NO: 683 - DNA, 354 bp, Homo sapiens
ggggtgcagctgttggagtctgggggaggcttggtacagcctggggggtccctgcgtctctcctgtgcagcctccggattcacctttgcttggtatgatatggggtgggcccgccaggctccagggaagggtctagagtgggtctcaagtattgatgattttggcacgcacacatactacgcagactccgtgaagggccggttcaccatctcccgcgacaattccaagaacacgctgtatctgcaaatgaacagcctgcgtgccgaggacaccgcggtatattactgtgcgacagcggagagggatgatacttttgactactggggtcagggaaccctggtcaccgtctcgagc

SEQ ID NO: 684 - DNA, 354 bp, Homo sapiens
ggggtgcagctgttggagtctgggggaggcttggtacagcctggggggtccctgcgtctctcctgtgcagcctccggattcacctttgcttggtatgatatggggtgggcccgccaggctccagggaagggtctagagtgggtctcaagtattgatgattctggtacgcagacatactacgcagactccgtgaagggcaggttcaccatctcccgcgacaattacaagaacacgctgtatctgcaaatgaacagcctgcgtgccgaggacaccgcggtatattactgtgcgacagcggagagggatgatacttttgactactggggtaagggaaccctggtcaccgtctcgagc

SEQ ID NO: 685 - DNA, 354 bp, Homo sapiens
ggggtgcagctgttggagtctgggggaggcttggtacagcctggggggtccctgcgtctctcctgtgcagcctccggattcacctttgcttggtatgatatggggtgggcccgccaggcaccagggaagggtctagagtgggtctcaagtattgatgattctggtacgcagacatactacgcagactccgtgaagggccggttcaccatctcccgcgacaattccaagaacacgctgtatctgcaaatgaacagcctgcgtgccgaggacaccgcggtatattactgtgcgacagcggagatggatgatacttatgactactggggtcagggaaccctggtcaccgtctcgagc

SEQ ID NO: 686 - DNA, 354 bp, Homo sapiens
ggggtgcagctgttggagtctgggggaggcttggttcagcctggggggtccctgcgtctctcctgtgcagcctccggattcacctttgcttggtatgatatggggtgggcccgccaggctccagggaagggactagagtgggtctcaagtattgatgattctggtacgctgacatactacgcagactccgtgaagggccggttcaccatctcccgcgacaattccaagaacacgctgtatctgcaaatgaacagcctgcgtgccgaggacaccgcggtatattactgtgcgacagcggagagggatgatacttatgactactggggtcagggaaccctggtcaccgtctcgagc

SEQ ID NO: 687 - DNA, 354 bp, Homo sapiens
ggggtgcagctgctggagtctgggggaggcttggtacagcctgggaggtccctgcgtctctcctgtgcagcctccggattcacctttgcttggtatgatatggggtgggcccgccaggctccagggaagggtctagagtgggtctcaagtattgatgattctggtacgcagacatactacgcagactccgtgaagggccggttcaccatctcccgcgacaattccaagaacacgctgtatctgcaaatgaacagcctgcgtgccgatgacaccgcggtatattactgtgcgacagcggagagggaagatacttatgactactggggtcagggaaccctggtcaccgtctcgagc

SEQ ID NO: 688 - DNA, 354 bp, Homo sapiens
ggggtgcagctgttggagtctgggggaggcttggtacagcctggggggtccctgcgtctctcctgtgcagcctccggattcatctttgcttggtatgatatggggtgggcccgccaggctccagggaagggtctagagtgggtctcaagtattgatgattctggtacgcagacatactacgcagactccgtgaagggccggttcaccatctcccgcgacaattccaagaacacgctgtatctgcaaatgaacagcctgcgtgccgaggacaccgcggtatattactgtgcgacagcggagagggatgatacttatgactactggggtcagggaaccctggtcaccgtctcgagc

SEQ ID NO: 689 - DNA, 354 bp, Homo sapiens
ggggtgcagctgttggagtctgggggaggcttggtacagcctggggggtccctgcgtctctcctgtgcagcctccggattcacctttgcttggtatgatatggggtgggcccgccaggctccagggaagggtctagagtgggtctcaagtattgatgattctggtacgcagacatactacgcagactcagtgaagggccggttcaccatcacccgcgacaattccaagaacacgctgtatctgcaaatgaacagcctgcgtgccgaggacaccgcggtatattactgtgcgacagcggagagggatgatacttttgactactggggtcagggaaccctggtcaccgtctcgagc

SEQ ID NO: 690 - DNA, 354 bp, Homo sapiens
ggggtgcagctgttggagtctgggggaggcttggtacagcctggggggtccctgcgtctctcctgtgcagcctccggattcatctttgcttggtatgatatggggtgggcccgccaggctccagggaagggtctagagtgggtctcaagtattgatgattctggtacgcagacatactacgcagactccgtgaagggccggttcaccatctcccgcgacaattccaagaacacgctgtatctgcaaatgaacagcctgcgtgccgaggacaccgcggtatattactgtgcgacagcggagagggatgatacttttgactactggggtcagggaaccctggtcaccgtctcgagc

SEQ ID NO: 691 - DNA, 354 bp, Homo sapiens
ggggtgcagctgttggagtctgggggaggcttggtacagcctggggggtccctgcgtctcacctgtgcagcctccggattcacctttgcttggtatgatatggggtgggcccgccaggctccagggaagggtctagagtgggtctcaagtattgatgattctggtacgcagacatactacgcagactccgtgaagggccggttcaccatctcccgcgacaattccaagaacacgctgtatctgcaaatgaacagcctgcgtgccgaggacaccgcggtatattactgtgcgacagcggagagggatgatacttatgactactggggtcagggaaccctggtcaccgtctcgagc

SEQ ID NO: 692 - DNA, 354 bp, Homo sapiens
ggggtgcagctgttggagtctgggggaggcttggtacagcctggggggtccctgcgtctctcctgtgcagcctccggattcacctttgcttggtatgatatggggtgggcccgccaggctccagggaagggtctagagtgggtctcaagtattgatgattctggtacgcggacatactacgcagactccgtgaagggccggttcaccatctcccgcgacaattccaagaacacgctgtatctgcaaatgaacagcctgcgtgccgaggacaccgcggtatattactgtgcgacagcggagagggatgatacttttgactactggggtcagggaaccctggtcaccgtctcgagc

SEQ ID NO: 693 - DNA, 354 bp, Homo sapiens
ggggtgcagctgttggagtctgggggaggcttggtacaacctggggggtccctgcgtctctcctgtgcagcctccggattcacctttgcttggtatgatatggggtgggcccgccaggctccagggaagggtctagagtgggtctcaagtattgatgattctggtacgcagacatactacgcagactccgtgaagggccggttcaccatctcccgcgacaattccaagaacacgctgtatctgcaaatgaacagcctgcgtgccgaggacaccgcggtatattactgtgcgacagcggagagggatgatacttatgactactggggtcagggaaccctggtcaccgtctcgagc

SEQ ID NO: 694 - DNA, 354 bp, Homo sapiens
ggggtgcggctgttggagtctgggggaggcttggtacagcctggggggtccctgcgtctctcctgtgcagcctccggattcacctttgcttggtatgatatggggtgggcccgccaggctccagggaagggtctagagtgggtctcaagtattgatgattctggtacgcagacatactacgcagactccgtgaagggccggttcaccatctcccgcgacaattccaagaacacgctgtatctgcaaatgaacagcctgcgtgccgaggacaccgcggtatattactgtgcgacagcggagagggatgatacttatgactactggggtcagggaaccctggtcaccgtctcgagc

SEQ ID NO: 695 - DNA, 354 bp, Homo sapiens
ggggtgcagctgttggagtctgggggaggcttggtacagcctggggggtccctgcgtctctcctgtgcagcctccggattcacctttgcttggtatgatatggggtgggcccgccaggctccagggaagggtctagagtgggtctcaagtattgatgattctggtacgcagacatactacgcagactccgtgaagggccggttcaccatctcccgcgacaattccaagaacaggctgtatctgcaaatgaacagcctgcgtgccgaggacaccgcggtatattactgtgcgacagcggagagggatgatacttatgactactggggtcagggaaccctggtcaccgtctcgagc

SEQ ID NO: 696 - DNA, 354 bp, Homo sapiens
ggggttcagctgttggagtctgggggaggtttggtacagcctggggggtccctgcgtctctcctgtgcagcctccggattcacctttgcttggtatgatatggggtgggcccgccaggctccagggaaggatctagagtgggtctcaagtattgatgattctggtacgcagacatactacgcagactccgtgaagggccggttcaccatctcccgcgacaattccaagaacacgctgtatctgcaaatgaacagcctgcgtgccgaggacaccgcggtatattactgtgcgacagcggagagggatgatacttatgactactggggtcagggaaccctggtcaccgtctcgagc

SEQ ID NO: 697 - DNA, 354 bp, Homo sapiens
ggggtgcagctgttggagtctgggggaggcttggtacagcctggggggtccctgcgtctctcctgtgcagcctccggattcacctttgcttggtatgatatggggtgggcccgccaggctccagggaagggtctagagtgggtctcaagtattgatgattctggtacgcggacatactacgcagactccgtgaagggccggttcaccatctcccgcgacaattccaagaacacgctgtatctgcaaatgaacagcctgcgtgccgaggacaccgcggtttattactgtgcgacagcggagagggatgatacttatgattactggggtcagggaaccctggtcaccgtctcgagc

SEQ ID NO: 698 - DNA, 354 bp, Homo sapiens
ggggtgcagctgttggagtctgggggaggcttggtacagcctggggggtccctgcgtctctcctgtgcagcctccggattcacctttgcatggtatgatatggggtgggcccgccaggctccagggaagggtctagagtgggtctcaactattgatgattctggtacgcagacatactacgcagactccgtgaagggccggttcaccatctcccgcgacaattccaagaacacgctgtatctgcaaatgaacagcctgcgtgccgaggacaccgcagtatattactgtgcgacagcggagttggaagatacttttgactactggggtcagggaaccctggtcacagtctctagc

SEQ ID NO: 699 - DNA, 354 bp, Homo sapiens
  misc_feature 165, 224: n = A,T,C or G
ggggtgcagctgttggagtctgggggaggcttggtacagcctggggggtccctgcgtctctcctgtgcagcctccggattcacctttgcttggtatgatatggggtgggcccgccaggctccagggaagggtctagagtgggtctcaagtattgatgattctggnacgcagacatactacgcagactccgtgaagggccggttcaccatctcccgcgacaattncaagaacacgctgtatctgcaaatgaacagcctgcgtgccgaggacaccgcggtatattactgtgcgacagcggagagggatgatacttttgactactggggtcagggaaccctggtcaccgtctcgagc

SEQ ID NO: 700 - DNA, 354 bp, Homo sapiens
ggggtgcagctgttggagtctgggggaggcttggtacagcctggggggtccctgcgtctctcctgtgcagcctccggattcacctttgcttggtatgatatggggtgggcccgccaggctccagggaagggtctagagtgggtctcaagtattgatgattctggtacgcggacatactacgcaggctccgtgaagggccggttcaccatctcccgcgacaattccaagaacacgctgtatctgcaaatgaacagcctgcgtgccgaggacaccgcggtatattactgtgcgacagcggagagggatgatacttatgactactggggtcagggaaccctggtcaccgtctcgagc

SEQ ID NO: 701 - DNA, 354 bp, Homo sapiens
ggggtgcagctgttggagtctgggggaggcttggtacagcctggggggtccctgcgtctctcctgtgcagcctccggattcacctttgcttggtatgatatggggtgggcccgccaggctccagggaagggtctagagtgggtctcaagtattgatgattctggtaggcagacatactacgcagactccgtgaagggccggttcaccatctcccgcgacaattccaagaacacgctgtatctgcaaatgaacagcctgcgtgccgaggacaccgcggtatattactgtgcgacagcggagagggatgatacttatgactactggggtcagggaaccctggtcaccgtctcgagc

SEQ ID NO: 702 - DNA, 354 bp, Homo sapiens
ggggtgcagctgttggagtctgggggaggcttggtacagcctggggggtccctgcgtctctcctgtgcagcctccggattcacctttgcttggtatgatatggggtgggcccgccaggctccagggaagggtctagagtgggtctcaagtattgatgattctggtacgcagacatactacgcagactccgtgaagggccggttcaccatctcccgcgacaattccaagaacatgctgtatctgcaaatgaacagcctgcgtgccgaggacaccgcggtatattactgtgcgacagcggagagggatgatacttttgactactggggtcagggaaccctggtcaccgtctcgagc

SEQ ID NO: 703 - DNA, 354 bp, Homo sapiens
ggggtgcagctgttggagtctgggggaggcttggtacagcctggggggtccctgcgtctctcctgtgcagcctccggattcacctttgcttggtatgatatggggtgggcccgccaggctccagggaagggtctagagtgggtctcaagtattgatgattctggtacgcagacatactacgcagactccgtgaagggccggttcaccatctcccgcgacaattccaagaacaagctgtatctgcaaatgaacagcctgcgtgccgaggacaccgcggtatattactgtgcgacagcggagagggatgatacttatgactactggggtcagggaaccctggtcaccgtctcgagc

SEQ ID NO: 704 - DNA, 354 bp, Homo sapiens
ggggtgcagctgttggagtctgggggaggcttggtacagcctggggggtccctgcgtctctcctgtgcagcctccggattcacctttgtttggtatgatatggggtgggcccgccagactccagggaagggtcttgagtgggtctcaagtattgatgattctggtacgcagacatactatgcagactccgtgaagggccggttcaccatctcccgcgacaattccaagaacacgctgtatctgcaaatgaacagcctgcgtgccgaggacaccgcggtatattactgtgcgacagcggagagtgatgatacttatgactactggggtcagggaaccctggtcaccgtctcgagc

SEQ ID NO: 705 - DNA, 354 bp, Homo sapiens
ggggtgcagctgttggagtctgggggaggcttggtacagcctggggggtccctgcgtctctcctgtgcagcctccggattcacctttgcttggtatgatatggggtgggcccgccaggctccagggaagggtctagagtgggtctcaagtattgatgattctggtacgcagacatactacgcagactccgtgaagggccggttcaccatctcccgcgacaattccaagaacacgctgtatctgcaaatgaacagcctgcgtgccgaggacaccgcggtatattactgtgcgacagcggagagggatgatatttttgactactggggtcagggtaccctggtcaccgtctcgagc

SEQ ID NO: 706 - DNA, 354 bp, Homo sapiens
ggggtgcagctgttggagtctgggggaggcttggtacagcctggggggtccctgcgtctctcctgtgcagcctccggattcacctttgcttggtatgatatggggtgggcccgccaggctccagggaagggtctagagtgggtctcaagtattgatgattctggtacgcagacatactacgcagactccgtgaagggccggttcaccatctcccgcgacaattccaagaacacgctgtatctgcaaatgaagagcctgcgtgccgaggacaccgcggtatattactgtgcgacagcggagagggatgatacttctgactactggggtcagggaaccctggtcaccgtctcgagc

SEQ ID NO: 707 - DNA, 354 bp, Homo sapiens
ggggtgcagctgttggagtctgggggaggcttggtacagcctggggggtccctgcgtctctcctgtgcagcctccggattcacctttgcttggtatgatatggggtgggtccgccaggctccagagaagggtctagagtgggtctcaagtattgatgattctggtacgcagacatactacgcagactccgtgaagggccggttcaccatctcccgcgacaattccaagaacacgctgtatctgcaaatgaacagcctgcgtgccgaggacaccgcggtatattactgtgcgacagcggagagggaagatagttatgactactggggtcagggaaccctggtcaccgtctcgagc

SEQ ID NO: 708 - DNA, 354 bp, Homo sapiens
ggggtgcagctgttggagtctgggggaggcttggtacagcctggggggtccctgcgtctctcctgtgcagcctccggattcacctttgcttggtatgatatggggtgggcccgccaggctccagggaagggtctagagtgggtctcagtgattgattggcatggtactgttacatactacgcagactccgtgaagggccggttcaccatctcccgcgacaattccaagaacacgctgtatctgcaaatgaacagcctgcgtgccgaggacaccgcggtatattactgtgcgacagcggagagggatgatacttttgactactggggtcagggaaccctggtcaccgtctcgagc

SEQ ID NO: 709 - DNA, 354 bp, Homo sapiens
ggggtgcagctgttggagtctgggggaggcttggtacagcctggggggtccctgcgtctctcctgtgcagcctccggattcacctttgcttggtatgatatggggtgggcccgccaggctccagggaagggtctagagtgggtctcaattattacggatacgggtgggcgtacatactacgcagactccgtgaagggccggttcaccatctcccgcgacaattccaagaacacgctgtatctgcaaatgaacagcctgcgtgccgaggacaccgcggtatattactgtgcgacagcggagagggatgatacttttgactactggggtcagggaaccctggtcaccgtctcgagc

SEQ ID NO: 710 - DNA, 354 bp, Homo sapiens
ggggtgcagctgttggagtctgggggaggcttggtacagcctggggggtccctgcgtctctcctgtgcagcctccggattcacctttgcttggtatgatatggggtgggcccgccaggctccagggaagggtcttgagtgggtctcaactattgattggaggggtacgattacatactacgcagactccgtgaagggccggttcaccatctcccgcgacaattccaagaacacgctgtatctgcaaatgaacagcctgcgtgccgaggacaccgcggtatattactgtgcgacagcggagagggatgatacttttgactactggggtcagggaaccctggtcaccgtctcgagc

SEQ ID NO: 711 - DNA, 354 bp, Homo sapiens
ggggtgcagctgttggagtctgggggaggcttggtacagcctggggggtccctgcgtctctcctgtgcagcctccggattcacctttgcttggtatgatatggggtgggcccgccaggctccagggaagggtctagagtgggtctcaagtattgattggcatggtgatgttacatactacgcagactccgtgaagggccggttcaccatctcccgcgacaattccaagaacacgctgtatctgcaaatgaacagcctgcgtgccgaggacaccgcggtatattactgtgcgacagcggagagggatgatacttttgactactggggtcagggaaccctggtcaccgtctcgagc

SEQ ID NO: 712 - DNA, 354 bp, Homo sapiens
ggggtgcagctgttggagtctgggggaggcttggtacagcctggggggtccctgcgtctctcctgtgcagcctccggattcacctttgcttggtatgatatggggtgggcccgccaggctccagggaagggtctagagtgggtctcaactattgattggcatggttctgagacatactacgcagactccgtgaagggccggttcaccatctcccgcgacaattccaagaacacgctgtatctgcaaatgaacagcctgcgtgccgaggacaccgcggtatattactgtgcgacagcggagagggatgatacttttgactactggggtcagggaaccctggtcaccgtctcgagc

SEQ ID NO: 713 - DNA, 354 bp, Homo sapiens
ggggtgcagctgttggagtctgggggaggcttggtacagcctggggggtccctgcgtctctcctgtgcagcctccggattcacctttgcttggtatgatatggggtgggcccgccaggctccagggaagggtctagagtgggtctcaactatttcttggcttggtactcatacatactacgcagactccgtgaagggccggttcaccatctcccgcgacaattccaagaacacgctgtatctgcaaatgaacagcctgcgtgccgaggacaccgcggtatattactgtgcgacagcggagagggatgatacttttgactactggggtcagggaaccctggtcaccgtctcgagc

SEQ ID NO: 714 - DNA, 354 bp, Homo sapiens
ggggtgcagctgttggagtctgggggaggcttggtacagcctggggggtccctgcgtctctcctgtgcagcctccggattcacctttgcttggtatgatatggggtgggcccgccaggctccagggaagggtctagagtgggtctcaagtattgattggcatggtacgagtacatactacgcagactccgtgaagggccggttcaccatctcccgcgacaattccaagaacacgctgtatctgcaaatgaacagcctgcgtgccgaggacaccgcggtatattactgtgcgacagcggagagggatgatacttttgactactggggtcagggaaccctggtcaccgtctcgagc

SEQ ID NO: 715 - DNA, 354 bp, Homo sapiens
ggggtgcagctgttggagtctgggggaggcttggtacagcctggggggtccctgcgtctctcctgtgcagcctccggattcacctttgcttggtatgatatggggtgggcccgccaggctccagggaagggtctagagtgggtctcaactattgattggcatggtgttgttacatactacgcagactccgtgaagggccggttcaccatctcccgcgacaattccaagaacacgctgtatctgcaaatgaacagcctgcgtgccgaggacaccgcggtatattactgtgcgacagcggagagggatgatacttttgactactggggtcagggaaccctggtcaccgtctcgagc

SEQ ID NO: 716 - DNA, 354 bp, Homo sapiens
ggggtgcagctgttggagtctgggggaggcttggtacagcctggggggtccctgcgtctctcctgtgcagcctccggattcacctttgcttggtatgatatggggtgggcccgccaggctccagggaagggtctagagtgggtctcaagtattgattggcatggtaatgttacatactacgcagactccgtgaagggccggttcaccatctcccgcgacaattccaagaacacgctgtatctgcaaatgaacagcctgcgtgccgaggacaccgcggtatattactgtgcgacagcggagagggatgatacctttgactactggggtcagggaaccctggtcaccgtctcgagc

SEQ ID NO: 717 - DNA, 354 bp, Homo sapiens
ggggtgcagctgttggagtctgggggaggcttggtacagcctggggggtccctgcgtctctcctgtgcagcctccggattcacctttgcttggtatgatatggggtgggtccgccaggctccagggaagggtctagagtgggtctcacagattgattggcatggtcttgcgacatactacgcagactccgtgaagggccggttcaccatctcccgcgacaattccaagaacacgctgtatctgcaaatgaacagcctgcgtgccgaggacaccgcggtatattactgtgcgacagcggagagggatgatacttttgactactggggtcagggaaccctggtcaccgtctcgagc

SEQ ID NO: 718 - DNA, 354 bp, Homo sapiens
ggggtgcagctgttggagtctgggggaggcttggtacagcctggggggtccctgcgtctctcctgtgcagcctccggattcacctttgcttggtatgatatggggtgggtccgccaggctccagggaagggtctagagtgggtctcaagtattgattggcatggtaataagacatactacgcagactccgtgaagggccggttcaccatctcccgcgacaattccaagaacacgctgtatctgcaaatgaacagcctgcgtgccgaggacaccgcggtatattactgtgcgacagcggagagggatgatacttttgactactggggtcagggaaccctggtcaccgtctcgagc

SEQ ID NO: 719 - DNA, 354 bp, Homo sapiens
ggggtgcagctgttggagtctgggggaggcttggtacagcctggggggtccctgcgtctctcctgtgcagcctctggattcaccttcgcttggtatgatatggggtgggtccgccaggctccagggaagggtctagagtgggtctcaagtattgattggcatggtcgtcctacatactacgcagactccgtgaagggccggttcaccatctcccgcgacaattccaagaacacgctgtatctgcaaatgaacagcctgcgtgccgaggacaccgcggtatattactgtgcgacagcggagagggatgatacttttgactactggggtcagggaaccctggtcaccgtctcgagc

SEQ ID NO: 720 - DNA, 354 bp, Homo sapiens
ggggtgcagctgttggagtctgggggaggcttggtacagcctggggggtccctgcgtctctcctgtgcagcctccggattcacctttgcttggtatgatatggggtgggtccgccaggctccagggaagggtctagagtgggtctcaaagatttctgatcttggttgtccgacatactacgcagactccgtgaagggccggttcaccatctcccgcgacaattccaagaacacgctgtatctgcaaatgaacagcctgcgtgccgaggacaccgcggtatattactgtgcgacagcggagagggatgatacttttgactactggggtcagggaaccctggtcaccgtctcgagc

SEQ ID NO: 721 - DNA, 354 bp, Homo sapiens
ggggtgcagctgttggagtctgggggaggcgtggtacagcctggggggtccctgcgtctctcctgtgcagcctccggattcacctttgcttggtatgatatggggtgggcccgccaggctccagggaagggtctagagtgggtctcaaagattacggattatggttttgctacatactacgcagactccgtgaagggccggttcaccgtctcccgcgacaattccaagaacacgctgtatctgcaaatgaacagcctgcgtgccgaggacaccgcggtatattactgtgcgacagcggagagggatgatacttttgactactggggtcagggaaccctggtcaccgtctcgagc

SEQ ID NO: 722 - DNA, 354 bp, Homo sapiens
ggggtgcagctgttggagtctgggggaggcttggtacagcctggggggtccctgcgtctctcctgtgcagcctccggattcacctttgcttggtatgatatggggtgggcccgccaggctccagggaagggtctagagtgggtctcaaagattactgatcttggttatgctacatactacgcagactccgtgaagggccggttcaccatctcccgcgacaattccaagaacacgctgtatctgcaaatgaacagcctgcgtgccgaggacaccgcggtatattactgtgcgacagcggagagggatgatacttttgactactggggtcagggaaccctggtcaccgtctcgagc

SEQ ID NO: 723 - DNA, 354 bp, Homo sapiens
ggggtgcagctgttggagtctgggggaggcttggtacagcctggggggtccctgcgtctctcctgtgcagcctccggattcacctttgcttggtatgatatggggtgggcccgccaggctccagggaagggtctagagtgggtctcaaggattgaggataatggtcggcatacatactacgcagactccgtgaagggccggttcaccatctcccgcgacaattccaagaacacgctgtatctgcaaatgaacagcctgcgtgccgaggacaccgcggtatattactgtgcgacagcggagagggatgatacttttgactactggggtcagggaaccctggtcaccgtctcgagc

SEQ ID NO: 724 - DNA, 354 bp, Homo sapiens
ggggtgcagctgttggagtctgggggaggcttggtacagcctggggggtccctgcgtctctcctgtgcagcctccggattcacctttgcttggtatgatatggggtgggcccgccaggctccagggaagggtctagagtgggtctcaactattgatgatttgggtcgtcatacatactacgcagactccgtgaagggccggttcaccatctcccgcgacaattccaagaacacgctgtatctgcaaatgaacagcctgcgtgccgaggacaccgcggtatattactgtgcgacagcggagagggatgatacttttgactactggggtcagggaaccctggtcaccgtctcgagc

SEQ ID NO: 725 - DNA, 354 bp, Homo sapiens
ggggtgcagctgttggagtctgggggaggcttggtacagcctggggggtccctgcgtctctcctgtgcagcctccggattcacctttgcttggtatgatatggggtgggcccgccaggctccagggaagggtctagagtgggtctcaactattagttggttgggtggtaatacatactacgcagactccgtgaagggccggttcaccatctcccgcgacaattccaagaacacgctgtatctgcaaatgaacagcctgcgtgccgaggacaccgcggtatattactgtgcgacagcggagagggatgatacttttgactactggggtcagggaaccctggtcaccgtctcgagc

SEQ ID NO: 726 - DNA, 354 bp, Homo sapiens
ggggtgcagctgttggagtctgggggaggcttggtacagcctggggggtccctgcgtctctcctgtgcagcctccggattcacctttgcttggtatgatatggggtgggtccgccaggctccagggaagggtctggagtgggtctcaacgattactgatttgggttatgcgacatactacgcagactccgtgaagggccggttcaccatctcccgcgacaattccaagaacacgctgtatctgcaaatgaacagcctgcgtgccgaggacaccgcggtatattactgtgcgacagcggagagggatgatacttttgactactggggtcagggaaccctggtcaccgtctcgagc

SEQ ID NO: 727 - DNA, 354 bp, Homo sapiens
ggggtgcagctgttggagtctgggggaggcttggtacagcctggggggtccctgcgtctctcctgtgcagcctccggattcacctttgcttggtatgatatggggtgggcccgccaggctccagggaagggtctagagtgggtctcaagtattgatgattctggtacgcagacatactacgcagactccgtgaggggccggttcaccatctcccgcgacaattccaagaacacgctgtatctgcaaatgaacagcctgcgtgccgaggacaccgcggtatattactgtgcgacagcggagagggatgatacttatgactactggggtcagggaaccctggtcaccgtctcgagc

SEQ ID NO: 728 - DNA, 354 bp, Homo sapiens
ggggtgcagctgttggagtctgggggaggcttggtacagcctggggggtccctgcgtctctcctgtgcagcctccggattcacctttgcttggtatgatatggggtgggcccgccaggctccagggaagggtctagagtgggtctcaagtattgatgattctggtacgcaggcatactacgcagactccgtgaagggccggttcaccatctcccgcgacaattccaagaacacgctgtatctgcaaatgaacagcctgcgtgccgaggacaccgcggtatattactgtgcgacagcggagagggatgatacttatgactactggggtcagggaaccctggtcaccgtctcgagc

SEQ ID NO: 729 - DNA, 354 bp, Homo sapiens
ggggtgcagctgttggagtctgggggaggcttggtacagcctggggggtccctgcgtctctcctgtgcagcctccggattcacctttgcttggtatgatatggggtgggcccgccaggctccagggaagggtctagagtgggtctcaagtattgatgattctggtatgcggacatactacgcagactccgtgaagggccggttcaccatctcccgcgacaattccaagaacacgctgtatctgcaaatggacagcctgcgtgccgaggacaccgcggtatattactgtgcgacagcggagagggatgatacttttgactactggggtcagggaaccctggtcaccgtctcgagc

SEQ ID NO: 730 - DNA, 354 bp, Homo sapiens
ggggtgcagctgttggagtctgggggaggcttggtacagcctggggggtccatgcgtctctcctgtgcagcctccggattcacctttgcttggtatgatatggggtgggcccgccaggctccagggaagggtctagagtgggtctcaagtattgatgattctggtacgcagacatactatgcagactccgtgaagggccggttcaccatctcccgcgacaattccaagaacacgctgtatctgcaaatgaacagcctgcgtgccgaggacaccgcggtatattactgtgcgacagcggagagggatgatacttatgactactggggtcagggaaccctggtcaccgtctcgagc

SEQ ID NO: 731 - DNA, 354 bp, Homo sapiens
ggggtgcagctgttggagtctgggggaggcttgatacagcctggggggtccctgcgtctctcctgtgcagcctccggattcacctttgcttggtatgatatggggtgggcccgccaggctccagggaagggtctagagtgggtctcaagtattgatgattctggtacgcagacatactacgcagactccgtgaagggccggttcaccatctcccgcgacaattccaagaacacgctgtatctgcaaatgaacagcctgcgtgccgaggacaccgcggtatattactgtgcgacagcggagagggatgatacttatgactactggggtcagggaaccctggtcaccgtctcgagc

SEQ ID NO: 732 - DNA, 354 bp, Homo sapiens
ggggtgcagctgttggagtctgggggaggcttggtacagcctggggggtccctgcgtctctcctgtgcagcctccggattcacctttgcttggtatgatatggggtgggcccgccaggctccagggaagggtctagagtgggtctcaagtattgatgattctggtacgcagacatactacgcagactcagtgaagggccggttcaccatctcccgcgacaatttcaagaacacgctgtatctgcaaatgaacagcctgcgagccgaggacaccgcggtatattactgtgcgacagcggagagggatgatacttatgactactggggtcagggaaccctggtcaccgtctcgagc

SEQ ID NO: 733 - DNA, 354 bp, Homo sapiens
ggggtgcagctgttggagtctgggggaggcttggtacagcctggggggtccctgcgtctctcctgtgcagcctccggattcacctttgcttggtatgatatggggtgggcccgccaggctccagggaagggtctagagtgggtctcaagtattgatgattctggtacgcagacatactacgcagactccgtgaagggccggttcaccatctcccgcgacaattccaagaacacgctgtatctgcaaatgagcagcctgcgtgccgaggacaccgcggtatattactgtgcgacagcggagagggatgatacttatgactactggggtcagggaaccctggtcaccgtctcgagc

SEQ ID NO: 734 - DNA, 354 bp, Homo sapiens
ggggtgcagctgttggagtctgggggaggcttggtacagcctggggggtccctgcgtctctcctgtgcagcctccggattcacctttgcttggtatgatatggggtgggcccgccaggctccagggaagggtctagagtgggtctcaagtattgatgattctggtacgcagacatactacgcagactccgtgaagggccggttcaccatctcccgcgacaattccaagaacacgctgtatctgcaaatggacagcctgcgtgccgaggacaccgcggtatattactgtgcgacagcggagagggatgatacttatgactactggggtcagggaaccctggtcaccgtctcgagc

SEQ ID NO: 735 - DNA, 354 bp, Homo sapiens
ggggtgcagctgttggagtctgggggaggcttggtacagcctggggggtccctgcgtctctcctgtgcagcctccggattcacctttgcttggtatgatatggggtgggcccgccaggctccagggaagggtctagagtgggtctcaagtattgatgattctggtatgcagacttactacgcagactccgtgaagggccggttcaccatctcccgcgacaattccaagaacacgctgtatctgcaaatgaacagcctgcgtaccgaggataccgcggtatattactgtgcgacagcggagagggatgatacttttgactactggggtcagggaaccctggtcaccgtctcgagc

SEQ ID NO: 736 - DNA, 354 bp, Homo sapiens
ggggtgcagctgttggagtctgggggaggcttggtacagcctggggggtccctgcgtctctcctgtgcagcctccggattcacctttgcttggtatgatatggggtgggcccgccaggctccagggaagggtctagagtgggtctcaagtattgatgattctggtacgcatacatactacgcagactccgtgaagggccggttcaccatctcccgcgacaattccaagaacacgctgtatctgcaaatgaacagcctgcgtgccgaggacaccgcggtatattactgtgcgacagcggagagggatgatacttttgactactggggtcagggaaccctggtcaccgtctcgagc

SEQ ID NO: 737 - DNA, 354 bp, Homo sapiens
ggggtgcagctgttggagtctgggggaggcttggtacagcctggggggtccctgcgtctctcctgtgcagcctccggattcatctttgcttggtatgatatggggtgggcccgccaggctccagggaagggtctagagtgggtctcaagtattgattggcatggtaatgttacatactacgcagactccgtgaagggccggttcaccatctcccgcgacaattccaagaacacgctgtatctgcaaatgaacagcctgcgtgccgaggacaccgcggtatattactgtgcgacagcggagagggatgatacctttgactactggggtcagggaaccctggtcaccgtctcgagc

SEQ ID NO: 738 - DNA, 354 bp, Homo sapiens
ggggtgcagctgttggagtctgggggaggcttggtacagcctggggggtccctgcgtctctcctgtgcagcctccggattcatctttgcttggtatgatatggggtgggcccgccaggctccagggaagggtctagagtgggtctcaagtattgattggcatggtaatgttacatactacgcagactccgtgaagggccggttcaccatctcccgcgacaattccaagaacacgctgtatctgcaaatgaacagcctgcgtgccgaggacaccgcggtatattactgtgcgacagcggagagggatgatacttatgactactggggtcagggaaccctggtcaccgtctcgagc

SEQ ID NO: 739 - DNA, 354 bp, Homo sapiens
ggggtgaagctgttggagtctgggggaggcttggtacagcctggggggtccctgcgtctctcctgtgcagcctccggattcacctttgcttggtatgatatggggtgggcccgccaggctccagggaagggtctagagtgggtctcaagtattgattggcatggtaatgttacatactacgcagactccgtgaagggccggttcaccatctcccgcgacaattccaagaacacgctgtatctgcaaatgaacagcctgcgtgccgaggacaccgcggtatattactgtgcgacagcggagagggatgatacctttgactactggggtcagggaaccctggtcaccgtctcgagc

SEQ ID NO: 740 - DNA, 354 bp, Homo sapiens
ggggtgcagctgttggagtctgggggaggcttggtacagcctggggggtccctgcgtctctcctgtgcagcctccggattcacctttgcttggtatgatatggggtgggtccgccaggctccagggaagggtctagagtgggtctcaagtattgattggcatggtaatgttacatactacgcagactccgtgaagggccggttcaccatctcccgcgacaattccaagaacacgctgtatctgcaaatgaacagcctgcgtgccgaggacaccgcggtatattactgtgcgacagcggagagggatgatacctttgactactggggtcagggaaccctggtcaccgtctcgagc

SEQ ID NO: 741 - DNA, 354 bp, Homo sapiens
ggggtgcagctgttggagtctgggggaggcttggtacagcctggggggtccctgcgtctctcctgtgcagcctccggattcacctttgcttggtatgatatggggtgggcccgccaggctccagggaagggtctagagtgggtctcacatattgattggcatggtaatcatacatactacgcagactccgtgaagggccggttcaccatctcccgcgacaattccaagaacacgctgtatctgcaaatgaacagcctgcgtgccgaggacaccgcggtatattactgtgcgacagcggagagggatgatacttttgactactggggtcagggaaccctggtcaccgtctcgagc

SEQ ID NO: 742 - DNA, 354 bp, Homo sapiens
ggggtgcagctgttggagtctgggggaggcttggtacagcctggggggtccctgcgtctctcctgtgcagcctccggattcacctttgcttggtatgatatggggtgggcccgccaggctccagggaggggtctagagtgggtctcaacgattaattggcatggtaataatacatactacgcagactccgtgaagggccggttcaccatctcccgcgacaattccaagaacacgctgtatctgcaaatgaacagcctgcgtgccgaggacaccgcggtatattactgtgcgacagcggagagggatgatacttttgactactggggtcagggaaccctggtcaccgtctcgagc

SEQ ID NO: 743 - DNA, 354 bp, Homo sapiens
ggggtgcagctgttggagtctgggggaggcttggtacagcctggggggtccctgcgtctctcctgtgcagcctccggattcacctttgcttggtatgatatggggtgggcccgccaggctccagggaagggtctagagtgggtctcaactattaattggcatggtgctgtgtcatactacgcagactccgtgaagggccggttcaccatctcccgcgacaattccaagaacacgctgtatctgcaaatgaacagcctgcgtgccgaggacaccgcggtatattactgtgcgacagcggagagggatgatacttttgactactggggtcagggaaccctggtcaccgtctcgagc

SEQ ID NO: 744 - DNA, 354 bp, Homo sapiens
ggggtgcagctgttggagtctgggggaggcttggtacagcctggggggtccctgcgtctctcctgtgcagcctccggattcacctttgcttggtatgatatggggtgggcccgccaggctccagggaagggtctagagtgggtctcattgattgattggatgggtcatgttacatactacgcagactccgtgaagggccggttcaccatctcccgcgacaattccaagaacacgctgtatctgcaaatgaacagcctgcgtgccgaggacaccgcggtatattactgtgcgacagcggagagggatgatacttttgactactggggtcagggaaccctggtcaccgtctcgagc

SEQ ID NO: 745 - DNA, 354 bp, Homo sapiens
ggggtgcagctgttggagtctgggggaggcttggtacagcctggggggtccctgcgtctctcctgtgcagcctccggattcacctttgcctggtatgatatggggtgggcccgccaggctccagggaagggtctagagtgggtctcaaagattgattggcatggtagtgttacatactacgcagactccgtgaagggccggttcaccatctcccgcgacaattccaagaacacgctgtatctgcaaatgaacagcctgcgtgccgaggacaccgcggtatattactgtgcgacagcggagggggatgatacttttgactactggggtcagggaaccctggtcaccgtctcgagc

SEQ ID NO: 746 - DNA, 354 bp, Homo sapiens
ggggtgcagctgttggagtctgggggaggcttggtacagcctggggggtccctgcgtctctcctgtgcagcctccggattcacctttgcttggtatgatatggggtgggcccgccaggctccagggaagggtctagagtgggtctcaactattgattggcatggtgagccgacatactacgcagactccgtgaagggccggttcaccatctcccgcgacaattccaagaacacgctgtatctgcaaatgaacagcctgcgtgccgaggacaccgcggtatattactgtgcgacagcggagagggatgatacttttgactactggggtcagggaaccctggtcaccgtctcgagc

SEQ ID NO: 747 - DNA, 354 bp, Homo sapiens
ggggtgcagctgttggagtctgggggaggcttggtacagcctggggggtccctgcgtctctcctgtgcagcctccggattcacctttgcttggtatgatatggggtgggcccgccaggctccagggaagggtctagagtgggtctcaacgattgattggcatggtcagcttacatactacgcagactccgtgaagggccggttcaccatctcccgcgacaattccaagaacacgctgtatctgcaaatgaacagcctgcgtgccgaggacaccgcggtatattactgtgcgacagcggagagggatgatacttttgactactggggtcagggaaccctggtcaccgtctcgagc

SEQ ID NO: 748 - DNA, 354 bp, Homo sapiens
ggggtgcagctgttggagtctgggggaggcttggtacagcctggggggtccctgcgtctctcctgtgcagcctccggattcacctttgcttggtatgatatggggtgggcccgccaggctccagggaagggtctagagtgggtctcaacgattgattggttgggttcggttacatactacgcagactccgtgaagggccggttcaccatctcccgcgacaattccaagaacacgctgtatctgcaaatgaacagcctgcgtgccgaggacaccgcggtatattactgtgcgacagcggagagggatgatacttttgactactggggtcagggaaccctggtcaccgtctcgagc

SEQ ID NO: 749 - DNA, 354 bp, Homo sapiens
ggggtgcagctgttggagtctgggggaggcttggtacagcctggggggtccctgcgtctctcctgtgcagcctccggattcacctttgcttggtatgatatggggtgggcccgccaggctccagggaagggtctagagtgggtctcagctattgatgatctgggtcggaggacatactacgcagactccgtgaagggccggttcaccatctcccgcgacaattccaagaacacgctgtatctgcaaatgaacagcctgcgtgccgaggacaccgcggtatattactgtgcgacagcggagagggatgatacttttgactactggggtcagggaaccctggtcaccgtctcgagc

SEQ ID NO: 750 - DNA, 354 bp, Homo sapiens
ggggtgcagctgttggagtctgggggaggcttggtacagcctggggggtccctgcgtctctcctgtgcagcctccggattcacctttgcttggtatgatatggggtgggcccgccaggctccagggaagggtctagagtgggtctcatcgattgatgatcggggtaggtatacatactacgcagactccgtgaagggccggttcaccatctcccgtgacaattccaagaacacgctgtatctgcaaatgaacagcctgcgtgccgaggacaccgcggtatattactgtgcgacggcggagagggatgatacttttgactactggggtcagggaaccctggtcaccgtctcgagc

SEQ ID NO: 751 - DNA, 354 bp, Homo sapiens
ggggtgcagctgttggagtctgggggaggcttggtacagcctggggggtccctgcgtctctcctgtgcagcctccggattcacctttgcttggtatgatatggggtgggcccgccaggctccagggaagggtctagagtgggtctcagttattagtgattatggtcgtggtacatactacgcagactccgtgaagggccggttcaccatctcccgcgacaattccaagaacacgctgtatctgcaaatgaacagcctgcgtgccgaggacaccgcggtatattactgtgcgacagcggagggggatgatacttttgactactggggtcagggaaccctggtcaccgtctcgagc

SEQ ID NO: 752 - DNA, 354 bp, Homo sapiens
ggggtgcagctgttggagtctgggggaggcttggtacagcctggggggtccctgcgtctctcctgtgcagcctccggattcacctttgcttggtatgatatggggtgggcccgccaggctccagggaagggtctagagtgggtctcaagtattgatgattcgggtcggtatacatactacgcagactccgtgaagggccggttcaccatctcccgcgacaattccaagaacacgctgtatctgcaaatgaacagcctgcgtgccgaggacaccgcggtatattactgtgcgacagcggagagggatgatacttttgactactggggtcagggaaccctggtcaccgtctcgagc

SEQ ID NO: 753 - DNA, 354 bp, Homo sapiens
ggggtgcagctgttggagtctgggggaggcttggtacagcctggggggtccctgcgtctctcctgtgcagcctccggattcacctttgcttggtatgatatggggtgggcccgccaggctccagggaagggtctagagtgggtctcagtgattgatgatgttggtagggggacatactacgcagactccgtgaagggccggttcaccatctcccgcgacaattccaagaacacgctgtatctgcaaatgaacagcctgcgtgccgaggacaccgcggtatattactgtgcgacagcggagagggatgatacttttgactactggggtcagggaaccctggtcaccgtctcgagc

SEQ ID NO: 754 - DNA, 355 bp, Homo sapiens
  misc_feature 322, 337: n = A,T,C or G
ggggtgcagctgttggagtctgggggaggcttggtacagcctggggggtccctgcgtctctcctgtgcagcctccggattcatctttgcttggtatgatatggggtgggcccgccaggctccagggaagggtctagagtgggtctcaagtattgattggcatggtaatgttacatactacgcagactccgtgaagggccggttcaccatctcccgcgacaattccaagaacacgctgtatctgcaaatgaacagcctgcgtgccgaggacaccgcggtatattactgtgcgacagcggagatcacgaaggggtatgagctanctggggtcagggaanccctggtcaccgttctac

SEQ ID NO: 755 - DNA, 354 bp, Homo sapiens
ggggtgcagctgttggagtctgggggaggcttggtacagcctggggggtccctgcgtctctcctgtgcagcctccggattcatctttgcttggtatgatatggggtgggcccgccaggctccagggaagggtctagagtgggtctcaagtattgattggcatggtaatgttacatactacgcagactccgtgaagggccggttcaccatctcccgcgacaattccaagaacacgctgtatctgcaaatgaacagcctgcgtgccgaggataccgcggtatattactgtgcgacagcggagacgttcttgggctatgactactggggtcagggaaccctggtcaccgtctcgagc

SEQ ID NO: 756 - DNA, 354 bp, Homo sapiens
ggggtgcagctgttggagtctgggggaggcttggtacagcctggggggtccctgcgtctctcctgtgcagcctccggattcatctttgcttggtatgatatggggtgggcccgccaggctccagggaagggtctagagtgggtctcaagtattgattggcatggtaatgttacatactacgcagactccgtgaagggccggttcaccatctcccgcgacaattccaagaacacgctgtatctgcaaatgaacagcctgcgtgccgaggataccgcggtatattactgtgcgacagcggaggagttggccggctatgactactggggtcagggaaccctggtcaccgtctcgagc

SEQ ID NO: 757 - DNA, 355 bp, Homo sapiens
  misc_feature 335: n = A,T,C or G
ggggtgcagctgttggagtctgggggaggcttggtacagcctggggggtccctgcgtctctcctgtgcagcctccggattcatctttgcttggtatgatatggggtgggcccgccaggctccagggaagggtctagagtgggtctcaagtattgattggcatggtaatgttacatactacgcagactccgtgaagggccggttcaccatctcccgcgacaattccaagaacacgctgtatctgcaaatgaacagcctgcgtgccgaggacaccgcggtatattactgtgcgacagcggagagggaggtggggtatgactactggggtcagggaanccctggtcaccgtctcgagc

SEQ ID NO: 758 - DNA, 354 bp, Homo sapiens
ggggtgcagctgttggagtctgggggaggcttggtacagcctggggggtccctgcgtctctcctgtgcagcctccggattcatctttgcttggtatgatatggggtgggcccgccaggctccagggaagggtctagagtgggtctcaagtattgattggcatggtaatgttacatactacgcagactccgtgaagggccggttcaccatctcccgcgacaattccaagaacacgctgtatctgcaaatgaacagcctgcgtgccgaggacaccgcggtatattactgtgcgacagcggagcagttggccgggtatgactactggggtcagggaaccctggtcaccgtctcgagc

SEQ ID NO: 759 - DNA, 354 bp, Homo sapiens
ggggtgcagctgttggagtctgggggaggcttggtacagcctggggggtccctgcgtctctcctgtgcagcctccggattcatctttgcttggtatgatatggggtgggcccgccaggctccagggaagggtctagagtgggtctcaagtattgattggcatggtaatgttacatactacgcagactccgtgaagggccggttcaccatctcccgcgacaattccaagaacacgctgtatctgcaaatgaacagcctgcgtgccgaggacaccgcggtatattactgtgcgacagcggagcacgacgagctctatgactactggggtcagggaaccctggtcaccgtctcgagc

SEQ ID NO: 760 - DNA, 354 bp, Homo sapiens
ggggtgcagctgttggagtctgggggaggcttggtacagcctggggggtccctgcgtctctcctgtgcagcctccggattcatctttgcttggtatgatatggggtgggcccgccaggctccagggaagggtctagagtgggtctcaagtattgattggcatggtaatgttacatactacgcagactccgtgaagggccggttcaccatctcccgcgacaattccaagaacacgctgtatctgcaaatgaacagcctgcgtgccgaggacaccgcggtatattactgtgcgacagcggagcgcacgcccacgtatgactactggggtcagggaaccctggtcaccgtctcgagc

SEQ ID NO: 761 - DNA, 355 bp, Homo sapiens
  misc_feature 349, 351: n = A,T,C or G
ggggtgcagctgttggagtctgggggaggcttggtacagcctggggggtccctgcgtctctcctgtgcagcctccggattcatctttgcttggtatgatatggggtgggcccgccaggctccagggaagggtctagagtgggtctcaagtattgattggcatggtaatgttacatactacgcagactccgtgaagggccggttcaccatctcccgcgacaattccaagaacacgctgtatctgcaaatgaacagcctgcgtgccgaggacaccgcggtatattactgtgcgacagcggaggccctcaaggggtatgactactggggtcagggaaccctggtcaccgttntngttg

SEQ ID NO: 762 - DNA, 354 bp, Homo sapiens
ggggtgcagctgttggagtctgggggaggcttggtacagcctggggggtccctgcgtctctcctgtgcagcctccggattcatctttgcttggtatgatatggggtgggcccgccaggctccagggaagggtctagagtgggtctcaagtattgattggcatggtaatgttacatactacgcagactccgtgaagggccggttcaccatctcccgcgacaattccaagaacacgctgtatctgcaaatgaacagcctgcgtgccgaggacaccgcggtatattactgtgcgacagcggagaccatctccgggtatgactactggggtcagggaaccctggtcaccgtctcgagc

SEQ ID NO: 763 - DNA, 355 bp, Homo sapiens
ggggtgcagctgttggagtctgggggaggcttggtacagcctggggggtccctgcgtctctcctgtgcagcctccggattcatctttgcttggtatgatatggggtgggcccgccaggctccagggaagggtctagagtgggtctcaagtattgattggcatggtaatgttacatactacgcagactccgtgaagggccggttcaccatctcccgcgacaattccaagaacacgctgtatctgcaaatgaacagcctgcgtgccgaggacaccgcggtatattactgtgcgacagcggagaacttccccggctatgactactggggtcagggaaccctggtcaccgtctcgagcg

SEQ ID NO: 764 - DNA, 354 bp, Homo sapiens
  misc_feature 181, 184: n = A,T,C or G
ggggtgcagctgttggagtctgggggaggcttggtacagcctggggggtccctgcgtctctcctgtgcagcctccggattcatcttttgggtgtatgacatggggtgggcccgccaggctccagggaagggtctggagtgggtctcaagtattgattggcatggtaatgttacatactacncanactccgtgaagggccggttcaccatctcccgcgacaattccaagaacacgctgtatctgcaaatgaacagcctgcgtgccgaggacaccgcggtatattactgtgcgacagcggagagggatgatacttatgactactggggtcagggaaccctggtcaccgtctcgagc

SEQ ID NO: 765 - DNA, 354 bp, Homo sapiens
  misc_feature 181, 184: n = A,T,C or G
ggggtgcagctgttggagtctgggggaggcttggtacagcctggggggtccctgcgtctctcctgtgcagcctccggattcatcttttggatctatgacatgggctgggcccgccaggctccagggaagggtctagagtgggtctcaagtattgattggcatggtaatgttacatactacncanactccgtgaagggccggttcaccatctcccgcgacaattccaagaacacgctgtatctgcaaatgaacagcctgcgtgccgaggacaccgcggtatattactgtgcgacagcggagagggatgatacttatgactactggggtcagggaaccctggtcaccgtctcgagc

SEQ ID NO: 766 - DNA, 355 bp, Homo sapiens
ggggtgcagctgttggagtctgggggaggcttggtacagcctggggggtccctgcgtctctcctgtgcagcctccggattcatctttgcttggtatgatatggggtgggcccgccaggctccagggaagggtctagagtgggtctcaagtattgattggcatggtaatgttacatactacgcagactccgtgaagggccggttcaccatctcccgcgacaattccaagaacacgctgtatctgcaaatgaacagcctgcgtgccgaggataccgcggtatattactgtgcgacagcggaggtggacaaggggtatgactactggggtcagggaaccctggtcaccgtctcgagct

SEQ ID NO: 767 - DNA, 355 bp, Homo sapiens
ggggtgcagctgttggagtctgggggaggcttggtacagcctggggggtccctgcgtctctcctgtgcagcctccggattcatctttgcttggtatgatatggggtgggcccgccaggctccagggaagggtctagagtgggtctcaagtattgattggcatggtaatgttacatactacgcagactccgtgaagggccggttcaccatctcccgcgacaattccaagaacacgctgtatctgcaaatgaacagcctgcgtgccgaggataccgcggtatattactgtgcgacagcggagtggctcccgtcctatgactactggggtcagggaaccctggtcaccgtctcgagcg

SEQ ID NO: 768 - DNA, 355 bp, Homo sapiens
ggggtgcagctgttggagtctgggggaggcttggtacagcctggggggtccctgcgtctctcctgtgcagcctccggattcatctttgcttggtatgatatggggtgggcccgccaggctccagggaagggtctagagtgggtctcaagtattgattggcatggtaatgttacatactacgcagactccgtgaagggccggttcaccatctcccgcgacaattccaagaacacgctgtatctgcaaatgaacagcctgcgtgccgaggataccgcggtatattactgtgcgacagcggagtccgaccccggctatgactactggggtcagggaaccctggtcaccgtctcgagcg

SEQ ID NO: 769 - DNA, 355 bp, Homo sapiens
ggggtgcggctgttggagtctgggggaggcttggtacagcctggggggtccctgcgtctctcctgtgcagcctccggattcatctttgcttggtatgatatggggtgggcccgccaggctccagggaagggtctagagtgggtctcaagtattgattggcatggtaatgttacatactacgcagactccgtgaagggccggttcaccatctcccgcgacaattccaagaacacgctgtatctgcaaatgaacagcctgcgtgccgaggacaccgcggtatattactgtgcgacagcggagaaggaggtcgggtatgactactggggtcagggaaccctggtcaccgttctcgagc

SEQ ID NO: 770 - DNA, 355 bp, Homo sapiens
ggggtgcagctgttggagtctgggggaggcttggtacagcctggggggtccctgcgtctctcctgtgcagcctccggattcatctttgcttggtatgatatggggtgggcccgccaggctccagggaagggtctagagtgggtctcaagtattgattggcatggtaatgttacatactacgcagactccgtgaagggccggttcaccatctcccgcgacaattccaagaacacgctgtatctgcaaatgaacagcctgcgtgccgaggacaccgcggtatattactgtgcgacagcggagcgggaccccggctatgactactggggtcagggaaccctggtcaccgtctcgagcg

SEQ ID NO: 771 - DNA, 355 bp, Homo sapiens
  misc_feature 227: n = A,T,C or G
ggggtgcagctgttggagtctgggggaggcttggtacagcctggggggtccctgcgtctctcctgtgcagcctccggattcatctttgcttggtatgatatggggtgggcccgccaggctccagggaagggtctagagtgggtctcaagtattgattggcatggtaatgttacatactacgcagactccgtgaagggccggttcaccatctcccgcgacaattccangaacacgctgtatctgcaaatgaacagcctgcgtgccgaggacaccgcggtatattactgtgcgacagcggagaaggtgcccacctatgactactggggtcagggaaccctggtcaccgtctcgagcg

SEQ ID NO: 772 - DNA, 354 bp, Homo sapiens
ggggtgcagctgttggagtctgggggaggcttggtacagcctggggggtccctgcgtctctcctgtgcagcctccggattcatctttgcttggtatgatatggggtgggcccgccaggctccagggaagggtctagagtgggtctcaagtattgattggcatggtaatgttacatactacgcagactccgtgaagggccggttcaccatctcccgcgacaattccaagaacacgctgtatctgcaaatgaacagcctgcgtgccgaggacaccgcggtatattactgtgcgacagcggagcgggtccccgggtatgactactggggtcagggaaccctggtcaccgtctcgagc

SEQ ID NO: 773 - DNA, 355 bp, Homo sapiens
ggggtgcagctgttggagtctgggggaggcttggtacagcctggggggtccctgcgtctctcctgtgcagcctccggattcatctttgcttggtatgatatggggtgggcccgccaggctccagggaagggtctagagtgggtctcaagtattgattggcatggtaatgttacatactacgcagactccgtgaagggccggttcaccatctcccgcgacaattccaagaacatgctgtatctgcaaatgaacagcctgcgtgccgaggacaccgcggtatattactgtgcgacagcggagaaggaccccggctatgactactggggtcagggaaccctggtcaccgtctcgagcg

SEQ ID NO: 774 - DNA, 354 bp, Homo sapiens
ggggtgcagctgttggagtctgggggaggcttggtacagcctggggggtccctgcgtctctcctgtgcagcctccggattcatctttgcttggtatgatatggggtgggcccgccaggctccagggaagggtctagagtgggtctcaagtattgattggcatggtaatgttacatactacgcagactccgtgaagggccggttcaccatctcccgcgacaattccaagaacacgctgtatctgcaaatgaacagcctgcgtgccgaggacaccgcggtatattactgtgcgacagcggagaaggagccggggtatgactactggggtcagggaaccctggtcaccgtctcgagc

SEQ ID NO: 775 - DNA, 355 bp, Homo sapiens
ggggtgcagctgttggagtctgggggaggcttggtacagcctggggggtccctgcgtctctcctgtgcagcctccggattcatctttgcttggtatgatatggggtgggcccgccaggctccagggaagggtctagagtgggtctcaagtattgattggcatggtaatgttacatactacgcagactccgtgaagggccggttcaccatctcccgcgacaattccaagaacacgctgtatctgcaaatgaacagcctgcgtgccgaggataccgcggtatattactgtgcgacagcggaggacgagcaggggtatgactactggggtcagggaaccctggtcaccgttctcgagc

SEQ ID NO: 776 - DNA, 355 bp, Homo sapiens
ggggtgcagctgttggagtctgggggaggcttggtacagcctggggggtccctgcgtctctcctgtgcagcctccggattcatctttgcttggtatgatatggggtgggcccgccaggccccagggaagggtctagagtgggtctcaagtattgattggcatggtaatgttacatactacgcagactccgtgaagggccggttcaccatctcccgcgacaattccaagaacacgctgtatctgcaaatgaacagcctgcgtgccgaggacaccgcggtatattactgtgcgacagcggagcgcgtgcccgggtatgactactggggtcagggaaccctggtcaccgtctcgagcg

SEQ ID NO: 777 - DNA, 354 bp, Homo sapiens
ggggtgcagctgttggagtctgggggaggcttggtacagcctggggggtccctgcgtctctcctgtgcagcctccggattcatcttttggatctatgacatggcctgggcccgccaggctccagggaagggtctggagtgggtctcaagtattgattggcatggtaatgttacatactacgcagactccgtgaagggccggttcaccatctcccgcgacaattccaagaacacgctgtatctgcaaatgaacagcctgcgtgccgaggacaccgcggtatattactgtgcgacagcggagagggatgatacttatgactactggggtcagggaaccctggtcaccgtctcgagc

SEQ ID NO: 778 - DNA, 354 bp, Homo sapiens
ggggtgcagctgttggagtctgggggaggcttggtacagcctggggggtccctgcgtctctcctgtgcagcctccggattcatctttatgtggtatgacatggggtgggcccgccaggctccagggaagggtctagagtgggtctcaagtattgattggcatggtaatgttacatactacgcagactccgtgaagggccggttcaccatctcccgcgacaattccaagaacacgctgtatctgcaaatgaacagcctgcgtgccgaggacaccgcggtatattactgtgcgacagcggagagggatgatacttatgactactggggtcagggaaccctggtcaccgtctcgagc

SEQ ID NO: 779 - DNA, 354 bp, Homo sapiens
ggggtgcagctgttggagtctgggggaggcttggtacagcctggggggtccctgcgtctctcctgtgcagcctccggattcatctttagctggtatgacatgaagtgggcccgccaggctccagggaagggtctagagtgggtctcaagtattgattggcatggtaatgttacatactacgcagactccgtgaagggccggttcaccatctcccgcgacaattccaagaacacgctgtatctgcaaatgaacagcctgcgtgccgaggacaccgcggtatattactgtgcgacagcggagagggatgatacttatgactactggggtcagggaaccctggtcaccgtctcgagc

SEQ ID NO: 780 - DNA, 355 bp, Homo sapiens
ggggtgcagctgttggagtctgggggaggcttggtacagcctggggggtccctgcgtctctcctgtgcagcctccggattcatctttgcttggtatgatatggggtgggcccgccaggctccagggaagggtctagagtgggtctcaagtattgattggcatggtaatgttacatactacgcagactccgtgaagggccggttcaccatctcccgcgacaattccaagaacacgctgtatctgcaaatgaacagcctgcgtgccgaggacaccgcggtatattactgtgcgacagcggaggccgagccggggtatgactactggggtcagggaaccctggtcaccgtctcgagcg

SEQ ID NO: 781 - DNA, 355 bp, Homo sapiens
ggggtgcagctgttggagtctgggggaggcttggtacagcctggggggtccctgcgtctctcctgtgcagcctccggattcatctttgcttggtatgatatggggtgggcccgccaggctccagggaagggtctagagtgggtctcaagtattgattggcatggtaatgttacatactacgcagactccgtgaagggccggttcaccatctcccgcgacaattccaagaacacgctgtatctgcaaatgaacagcctgcgtgccgaggacaccgcggtatattactgtgcgacagcggaggaggaggaggggtatgactactggggtcagggaaccctggtcaccgtctcgagcg

SEQ ID NO: 782 - DNA, 355 bp, Homo sapiens
ggggtgcagctgttggagtctgggggaggcttggtacagcctggggggtccctgcgtctctcctgtgcagcctccggattcatctttgcttggtatgatatggggtgggcccgccaggctccagggaagggtctagagtgggtctcaagtattgattggcatggtaatgttacatactacgcagactccgtgaagggccggttcaccatctcccgcgacaattccaagaacacgctgtatctgcaaatgaacagcctgcgtgccgaggataccgcggtatattactgtgcgacagcggaggacgacccggggtatgactactggggtcagggaaccctggtcaccgtctcgagcg

SEQ ID NO: 783 - DNA, 355 bp, Homo sapiens
ggggtgcagctgttggagtctgggggaggcttggtacagcctggggggtccctgcgtctctcctgtgcagcctccggattcatctttgcttggtatgatatggggtgggcccgccaggctccagggaagggtctagagtgggtctcaagtattgattggcatggtaatgttacatactacgcagactccgtgaagggccggttcaccatctcccgcgacaattccaagaacacgctgtatctgcaaatgaacagcctgcgtgccgaggacaccgcggtatattactgtgcgacagcggagtgggagcccgggtatgactactggggtcagggaaccctggtcaccattctcgagc

SEQ ID NO: 784 - DNA, 355 bp, Homo sapiens
ggggtgcagctgttggagtctgggggaggcttggtacagcctggggggtccctgcgtctctcctgtgcagcctccggattcatctttgcttggtatgatatggggtgggcccgccaggctccagggaagggtctagagtgggtctcaagtattgattggcatggtaatgttacatactacgcagactccgtgaagggccggttcaccatctcccgcgacaattccaagaacacgctgtatctgcaaatgaacagcctgcgtgccgaggacaccgcggtatattactgtgcgacagcggaggagatccccgggtatgactactggggtcagggaaccctggtcaccgttctcgagc

SEQ ID NO: 785 - DNA, 354 bp, Homo sapiens
ggggtgcagctgttggagtctgggggaggcttggtacagcctggggggtccctgcgtctctcctgtgcagcctccggattcatctttgcttggtatgatatggggtgggcccgccaggctccagggaagggtctagagtgggtctcaagtattgattggcatggtaatgttacatactacgcagactccgtgaagggccggttcaccatctcccgcgacaattccaagaacacgctgtatctgcaaatgaacagcctgcgtgccgaggacaccgcggtatattactgtgcgacagcggaggacgagccggggtatgactactggggtcagggaaccctggtcaccgtctcgagc

SEQ ID NO: 786 - DNA, 355 bp, Homo sapiens
ggggtgcagctgttggagtctgggggaggcttggtacagcctggggggtccctgcgtctctcctgtgcagcctccggattcatctttgcttggtatgatatggggtgggcccgccaggctccagggaagggtctagagtgggtctcaagtattgattggcatggtaatgttacatactacgtagactccgtgaagggccggttcaccatctcccgcgacaattccaagaacacgctgtatctgcaaatgaacagcctgcgtgccgaggacaccgcggtatattactgtgcgacagcggagaccgagccggggtatgactactggggtcagggaaccctggtcaccgtctcgagcg

SEQ ID NO: 787 - DNA, 355 bp, Homo sapiens
ggggtgcagctgttggagtctgggggaggcttggtacagcctggggggtccctgcgtctctcctgtgcagcctccggattcatctttgcttggtatgatatggggtgggcccgccaggctccagggaagggtctagagtgggtctcaagtattgattggcatggtaatgttacatactacgcagactccgtgaagggccggttcaccatctcccgcgacaattccaagaacacgctgtatctgcaaatgaacagcctgcgtgccgaggacaccgcggtatattactgtgcgacagcggagtcgatccccgggtatgactactggggtcagggaaccctggtcaccgtctcgagcg

SEQ ID NO: 788 - DNA, 354 bp, Homo sapiens
ggggtgcagctgttggagtctgggggaggcttggtacagcctggggggtccctgcgtctctcctgtgcagcctccggattcatctttgcttggtatgatatggggtgggcccgccaggctccagggaagggtctagagtgggtctcaagtattgattggcatggtaatgttacatactacgcagactccgtgaagggccggttcaccatctcccgcgacaattccaagaacacgctgtatctgcaaatgaacagcctgcgtgccgaggataccgcggtatattactgtgcgacagcggagagggagccggggtatgactactggggtcagggaaccctggtcaccgtctcgagc

SEQ ID NO: 789 - DNA, 354 bp, Homo sapiens
ggggtgcagctgttggagtctgggggaggcttggtacagcctggggggtccctgcgtctctcctgtgcagcctccggattcatctttgcttggtatgatatggggtgggcccgccaggctccagggaagggtctagagtgggtctcaagtattgattggcatggtaatgttacatactacgcagactccgtgaagggccggttcaccatctcccgcgacaattccaagaacacgctgtatctgcaaatgaacagcctgcgtgccgaggacaccgcggtatattactgtgcgacagcggagaaggaggagggctatgactactggggtcagggaaccctggtcaccgtctcgagc

SEQ ID NO: 790 - DNA, 354 bp, Homo sapiens
ggggtgcagctgttggagtctgggggaggcttggtacagcctggggggtccctgcgtctctcctgtgcagcctccggattcatctttgcttggtatgatatggggtgggcccgccaggctccagggaagggtctagagtgggtctcaagtattgattggcatggtaatgttacatactacgcagactccgtgaagggccggttcaccatctcccgcgacaattccaagaacacgctgtatctgcaaatgaacagcctgcgtgccgaggacaccgcggtatattactgtgcgacagcggagttggacgagggctatgactactggggtcagggaaccctggtcaccgtctcgagc

SEQ ID NO: 791 - DNA, 355 bp, Homo sapiens
ggggtgcagctgttggagtctgggggaggcttggtacagcctggggggtccctgcgtctctcctgtgcagcctccggattcatctttgcttggtatgatatggggtgggcccgccaggctccagggaagggtctagagtgggtctcaagtattgattggcatggtaatgttacatactacgcagactccgtgaagggccggttcaccatctcccgcgacaattccaagaacacgctgtatctgcaaatgaacagcctgcgtgccgaggataccgcggtatattactgtgcgacagcggagtggtggcccggctatgactactggggtcagggaaccctggtcaccgtctcgagca

SEQ ID NO: 792 - DNA, 354 bp, Homo sapiens
ggggtgcagctgttggagtctgggggaggcttggtacagcctggggggtccctgcgtctctcctgtgcagcctccggattcatctttgcttggtatgatatggggtgggcccgccaggctccagggaagggtctagagtgggtctcaagtattgattggcatggtaatgttacatactacgcagactccgtgaagggccggttcaccatctcccgcgacaattccaagaacacgctgtatctgcaaatgaacagcctgcgtgccgaggacaccgcggtatattactgtgcgacagcggagtcgtacaaggggtatgactactggggtcagggaaccctggtcaccgtctcgagc

SEQ ID NO: 793 - DNA, 355 bp, Homo sapiens
ggggtgcagctgttggagtctgggggaggcttggtacagcctggggggtccctgcgtctctcctgtgcagcctccggattcgtctttgcttggtatgatatggggtgggcccgccaggctccagggaagggtctagagtgggtctcaagtattgattggcacggtaatgttacatactacgcagactccgtgaagggccggttcaccatctcccgcgacaattccaagaacacgctgtatctgcaaatgaacagcctgcgtgccgaggacaccgcggtatattactgtgcgacagcggagttggacgaggggtatgactactggggtcagggaaccctggtcaccgtctcgagca

SEQ ID NO: 794 - DNA, 354 bp, Homo sapiens
ggggtgcagctgttggagtctgggggaggcttggtacagcctggggggtccctgcgtctctcctgtgcagcctccggattcatctttgcttggtatgatatggggtgggcccgccaggctccagggaagggtctagagtgggtctcaagtattgattggcatggtaatgttacatactacgcagactccgtgaagggccggttcaccatctcccgcgacaattccaagaacacgctgtatctgcaaatgaacagcctgcgtgccgaggacaccgcggtatattactgtgcgacagcggaggacacgcccgggtatgactactggggtcagggaaccctggtcaccgtctcgagc

SEQ ID NO: 795 - DNA, 355 bp, Homo sapiens
ggggtgcagctgttggagtctgggggaggcttggtacagcctggggggtccctgcgtctctcctgtgcagcctccggattcatctttgcttggtatgatatggggtgggcccgccaggctccagggaagggtctagagtgggtctcaagtattgattggcatggtaatgttacatactacgcagactccgtgaagggccggttcaccatctcccgcgacaattccaagaacacgctgtatctgcaaatgaacagcctgcgtgccgaggacaccgcggtatattactgtgcgacagcggaggaggagcccggctatgactactggggtcagggaaccctggtcaccgtctcgagca

SEQ ID NO: 796 - DNA, 356 bp, Homo sapiens
ggggtgcagctgttggagtctgggggaggcttggtacagcctggggggtccctgcgtctctcctgtgcagcctccggattcatctttgcttggtatgatatggggtgggcccgccaggctccagggaagggtctagagtgggtctcaagtattgattggcatggtaatgttacatactacgcagactccgtgaagggccggttcaccatctcccgcgacaattccaagaacacgctgtatctgcaaatgaacagcctgcgtgccgaggataccgcggtatattactgtgcgacagcggagaagacgcccgggtatgactactggggtcagggaaccctggtcaccgtctcgagcac

SEQ ID NO: 797 - DNA, 354 bp, Homo sapiens
gaggtgcagctgttggagtctgggggaggcttggtacagcctggggggtccctgcgtctctcctgtgcagcctccggattcatctttgcttggtatgatatggggtgggcccgccaggctccagggaagggtctagagtgggtctcaagtattgattggcatggtaatgttacatactacgcagactccgtgaagggccggttcaccatctcccgcgacaattccaagaacacgctgtatctgcaaatgaacagcctgcgtgccgaggacaccgcggtatattactgtgcgacagcggagaaggagccggggtatgactactggggtcagggaaccctggtcaccgtctcgagc

SEQ ID NO: 798 - DNA, 354 bp, Homo sapiens
ggggtgcagctgttggagtctgggggaggcttggtacagcctggggggtccctgcgtctctcctgtgcagcctccggattcatctttgcttggtatgatatggggtgggcccgccaggctccagggaagggtctagagtgggtctcaagtattgattggcatggtaatgttacatactacgcagactccgtgaagggccggttcaccatctcccgcgacaattccaagaacacgctgtatctgcaaatgaacagcctgcgtgccgaggacaccgcggtatattactgtgcgacatttgagagggatgatacttatgactactggggtcagggaaccctggtcaccgtctcgagc

SEQ ID NO: 799 - DNA, 354 bp, Homo sapiens
ggggtgcagctgttggagtctggggggggcttggtacagcctggggggtccctgcgtctctcctgtgcagcctccggattcatctttgcttggtatgatatggggtgggcccgccaggctccagggaagggtctagagtgggtctcaagtattgattggcatggtaatgttacatactacgcagactccgtgaagggccggttcaccatctcccgcgacaattccaagaacacgctgtatctgcaaatgaacagcctgcgtgccgaggacaccgcggtatattactgtgcgacaactgagagggatgatacttatgactactggggtcagggaaccctggtcaccgtctcgagc

SEQ ID NO: 800 - DNA, 354 bp, Homo sapiens
ggggtgcagctgttggagtctgggggaggcttggtacagcctggggggtccctgcgtctctcctgtgcagcctccggattcatctttgcttggtatgatatggggtgggcccgccaggctccagggaagggtctagagtgggtctcaagtattgattggcatggtaatgttacatactacgcagactccgtgaagggccggttcaccatctcccgcgacaattccaagaacacgctgtatctgcaaatgaacagcctgcgtgccgaggacaccgcggtatattactgtgcgacagaggagagggatgatacttatgactactggggtcagggaaccctggtcaccgtctcgagc

SEQ ID NO: 801 - DNA, 354 bp, Homo sapiens
ggggtgcagctgttggagtctgggggaggcttggtacagcctggggggtccctgcgtctctcctgtgcagcctccggattcatctttgcttggtatgatatggggtgggcccgccaggctccagggaagggtctagagtgggtctcaagtattgattggcatggtaatgttacatactacgcagactccgtgaagggccggttcaccatctcccgcgacaattccaagaacacgctgtatctgcaaatgaacagcctgcgtgccgaggacaccgcggtatattactgtgcgacatcggagagggatgatacttatgactactggggtcagggaaccctggtcaccgtctcgagc

SEQ ID NO: 802 - DNA, 354 bp, Homo sapiens
ggggtgcagctgttggagtctgggggaggcttggtacagcctggggggtccctgcgtctctcctgtgcagcctccggattcatctttgcttggtatgatatggggtgggcccgccaggctccagggaagggtctagagtgggtctcaagtattgattggcatggtaatgttacatactacgcagactccgtgaagggccggttcaccatctcccgcgacaattccaagaacacgctgtatctgcaaatgaacagcctgcgtgccgaggacaccgcggtatattactgtgcgacaattgagagggatgatacttatgactactggggtcagggaaccctggtcaccgtctcgagc

SEQ ID NO: 803 - DNA, 354 bp, Homo sapiens
ggggtgcagctgttggagtctgggggaggcttggtacagcctggggggtccctgcgtctctcctgtgcagcctccggattcatctttgcttggtatgatatggggtgggcccgccaggctccagggaagggtctagagtgggtctcaagtattgattggcatggtaatgttacatactacgcagactccgtgaagggccggttcaccatctcccgcgacaattccaagaacacgctgtatctgcaaatgaacagcctgcgtgccgaggacaccgcggtatattactgtgcgacagcgacgagggatgatacttatgactactggggtcagggaaccctggtcaccgtctcgagc

SEQ ID NO: 804 - DNA, 354 bp, Homo sapiens
ggggtgcagctgttggagtctgggggaggcttggtacagcctggggggtccctgcgtctctcctgtgcagcctccggattcatctttgcttggtatgatatggggtgggcccgccaggctccagggaagggtctagagtgggtctcaagtattgattggcatggtaatgttacatactacgcagactccgtgaagggccggttcaccatctcccgcgacaattccaagaacacgctgtatctgcaaatgaacagcctgcgtgccgaggacaccgcggtatattactgtgcgacagcggagagggatgagacttatgactactggggtcagggaaccctggtcaccgtctcgagc

SEQ ID NO: 805 - DNA, 354 bp, Homo sapiens
ggggtgcagctgttggagtctgggggaggcttggtacagcctggggggtccctgcgtctctcctgtgcagcctccggattcatctttgcttggtatgatgtggggtgggcccgccaggctccagggaagggtctagagtgggtttcaagtattgattggcatggtaatgttacatactacgcagactccgtgaagggccggttcaccatctcccgcgacaattccaagaacacgctgtatctgcaaatgaacagcctgcgtgccgaggataccgcggtatattactgtgcgacagcggagagggatgatatgtatgactactggggtcagggaaccctggtcaccgtctcgagc

SEQ ID NO: 806 - DNA, 354 bp, Homo sapiens
ggggtgcagctgttggagtctgggggaggcttggtacagcctggggggtccctgcgtctctcctgtgcagcctccggattcatctttgcttggtatgatatggggtgggcccgccaggctccagggaagggtctagagtgggtctcaagtattgattggcatggtaatgttacatactacgcagactccgtgaagggccggttcaccatctcccgcgacaattccaagaacacgctgtatctgcaaatgaacagcctgcgtgccgaggacaccgcggtatattactgtgcgacagcggagagggatgatacttatctgtactggggtcagggaaccctggtcaccgtctcgagc

SEQ ID NO: 807 - DNA, 355 bp, Homo sapiens
ggggtgcagctgttggagtctgggggaggcttggtacagcctggggggtccctgcgtctctcctgtgcagcctccggattcatctttgcttggtatgatatggggtgggcccgccaggctccagggaagggtctagagtgggtctcaagtattgattggcatggtaatgttacatactacgcagactccgtgaagggccggttcaccatctcccgcgacaattccaagaacacgctgtatctgcaaatgaacagcctgcgtgccgaggacaccgcggtatattactgtgcgacagcggaggtggagccggggtatgactactggggtcagggaaccctggtcaccgttctcgaga

SEQ ID NO: 808 - DNA, 355 bp, Homo sapiens
ggggtgcagctgttggagtctgggggaggcttggtacagcctggggggtccctgcgtctctcctgtgcagcctccggattcatctttgcttggtatgatatggggtgggcccgccaggctccagggaagggtctagagtgggtctcaagtattgattggcatggtaatgttacatactacgcagactccgtgaagggccggttcaccatctcccgcgacaattccaagaacacgctgtatctgcaaatgaacagcctgcgtgccgaggacaccgcggtatattactgtgcgacagcggagtcggagcccgggtatgactactggggtcagggaaccctggtcaccgttctcgagc

SEQ ID NO: 809 - DNA, 355 bp, Homo sapiens
ggggtgcagctgttggagtctgggggaggcttggtacagcctggggggtccctgcgtctctcctgtgcagcctccggattcatctttgcttggtatgatatggggtgggcccgccaggctccagggaagggtctagagtgggtctcaagtattgattggcatggtaatgttacatactacgcagactccgtgaagggccggttcaccatctcccgcgacaattccaagaacacgctgtatctgcaaatgaacagcctgcgtgccgaggacaccgcggtatattactgtgcgacagcggaggacttgccggggtatgactactggggtcagggaaccctggtcaccgtctcgagcg

SEQ ID NO: 810 - DNA, 355 bp, Homo sapiens
ggggtgcagctgttggagtctgggggaggcttggtacagcctggggggtccctgcgtctctcctgtgcagcctccggattcatctttgcttggtatgatatggggtgggcccgccaggctccagggaagggtctagagtgggtctcaagtattgattggcatggtaatgttacatactacgcagactccgtgaagggccggttcaccatctcccgcgacaattccaagaacacgctgtatctgcaaatgaacagcctgcgtgccgaggacaccgcggtatattactgtgcgacagcggagtcgctgccggggtatgactactggggtcagggaaccctggtcaccgtctcgagcg

SEQ ID NO: 811 - DNA, 355 bp, Homo sapiens
ggggtgcagctgttggagtctgggggaggcttggtacagcctggggggtccctgcgtctctcctgtgcagcctccggattcatctttgcttggtatgatatggggtgggcccgccaggctccagggaagggtctagagtgggtctcaagtattgattggcatggtaatgttacatactacgcagactccgtgaagggccggttcaccatctcccgcgacaattccaagaacacgctgtatctgcaaatgaacagcctgcgtgccgaggataccgcggtatattactgtgcgacagcggagtacgagccggggtatgactactggggtcagggaaccctggtcaccgtctcgagcg

SEQ ID NO: 812 - DNA, 355 bp, Homo sapiens
ggggtgcagctgttggagtctgggggaggcttggtacagcctggggggtccctgcgtctctcctgtgcagcctccggattcatctttgcttggtatgatatggggtgggcccgccaggctccagggaagggtctagagtgggtctcaagtattgattggcatggtaatgttacatactacgcagactccgtgaagggccggttcaccatctcccgcgacaattccaagaacacgctgtatctgcaaatgaacagcctgcgtgccgaggataccgcggtatattactgtgcgacagcggagcaggacccgggctatgactactggggtcagggaaccctggtcaccgtctcgagcg

SEQ ID NO: 813 - DNA, 355 bp, Homo sapiens
ggggtgcagctgttggagtctgggggaggcttggtacagcctggggggtccctgcgtctctcctgtgcagcctccggattcatctttgcttggtatgatatggggtgggcccgccaggctccagggaagggtctagagtgggtctcaagtattgattggcatggtaatgttacatactacgcagactccgtgaagggccggttcaccatctcccgcgacaattccaagaacacgctgtatctgcaaatgaacagcctgcgtgccgaggacaccgcggtatattactgtgcgacagcggagatggagccgggctatgactactggggtcagggaaccctggtcaccgttctcgagc

SEQ ID NO: 814 - DNA, 355 bp, Homo sapiens
ggggtgcagctgttggagtctgggggaggcttggtacagcctggggggtccctgcgtctctcctgtgcagcctccggattcatctttgcttggtatgatatggggtgggcccgccaggctccagggaagggtctagagtgggtctcaagtattgattggcatggtaatgttacatactacgcagactccgtgaagggccggttcaccatctcccgcgacaattccaagaacacgctgtatctgcaaatgaacagcctgcgtgccgaggacaccgcggtatattactgtgcgacagcggaggaggacccggggtatgactactggggtcagggaaccctggtcaccgtctcgagcg

SEQ ID NO: 815 - DNA, 355 bp, Homo sapiens
ggggtgcagctgttggagtctgggggaggcttggtacagcctggggggtccctgcgtctctcctgtgcagcctccggattcatctttgcttggtatgatatggggtgggcccgccaggctccagggaagggtctagagtgggtctcaagtattgattggcatggtaatgttacatactacgcagactccgtgaagggccggttcaccatctcccgcgacaattccaagaacacgctgtatctgcaaatgaacagcctgcgtgccgaggacaccgcggtatattactgtgcgacagcggagttcgtgccgggctatgactactggggtcagggaaccctggtcaccgtctcgagca

SEQ ID NO: 816 - DNA, 355 bp, Homo sapiens
ggggtgcagctgttggagtctgggggaggcttggtacagcctggggggtccctgcgtctctcctgtgcagcctccggattcatctttgcttggtatgatatggggtgggcccgccaggctccagggaagggtctagagtgggtctcagggattgattggcatggtaatgttacatactacgcagactccgtgaagggccggttcaccatctcccgcgacaattccaagaacacgctgtatctgcaaatgaacagcctgcgtgccgaggacaccgcggtatattactgtgcgacagcggaggacgagccggggtatgactactggggtcagggaaccctggtcaccgtctcgagcg

SEQ ID NO: 817 - DNA, 355 bp, Homo sapiens
ggggtgcagctgttggagtctgggggaggcttggtacagcctggggggtccctgcgtctctcctgtgcagcctccggattcatctttgcttggtatgatatggggtgggcccgccaggctccagggaagggtctagagtgggtctcatacattgattggcatggtaatgttacatactacgcagactccgtgaagggccggttcaccatctcccgcgacaattccaagaacacgctgtatctgcaaatgaacagcctgcgtgccgaggacaccgcggtatattactgtgcgacagcggaggacgagccggggtatgactactggggtcagggaaccctggtcaccgtctcgagcg

SEQ ID NO: 818 - DNA, 355 bp, Homo sapiens
ggggtgcagctgttggagtctgggggaggcttggtacagcctggggggtccctgcgtctctcctgtgcagcctccggattcatctttgcttggtatgatatggggtgggcccgccaggctccagggaagggtctagagtgggtctcaaagattgattggcatggtaatgttacatactacgcagactccgtgaagggccggttcaccatctcccgcgacaattccaagaacacgctgtatctgcaaatgaacagtctgcgtgccgaggacaccgcggtatattactgtgcgacagcggaggacgagccggggtatgactactggggtcagggaaccctggtcaccgtctcgagcg

SEQ ID NO: 819 - DNA, 355 bp, Homo sapiens
ggggtgcagctgttggagtctgggggaggcttggtacagcctggggggtccctgcgtctctcctgtgcagcctccggattcatctttgcttggtatgatatggggtgggcccgccaggctccagggaagggtctagagtgggtctcagtcattgattggcatggtaatgttacatactacgcagactccgtgaagggccggttcaccatctcccgcgacaattccaagaacacgctgtatctgcaaatgaacagcctgcgtgccgaggacaccgcggtatattactgtgcgacagcggaggacgagccggggtatgactactggggtcagggaaccctggtcaccgtctcgagcg

SEQ ID NO: 820 - DNA, 355 bp, Homo sapiens
ggggtgcagctgttggagtctgggggaggcttggtacagcctggggggtccctgcgtctctcctgtgcagcctccggattcatctttgcttggtatgatatggggtgggcccgccaggctccagggaagggtctagagtgggtctcaatcattgattggcatggtaatgttacatactacgcagactccgtgaagggccggttcaccatctcccgcgacaattccaagaacacgctgtatctgcaaatgaacagcctgcgtgccgaggacaccgcggtatattactgtgcgacagcggaggacgagccggggtatgactactggggtcagggaaccctggtcaccgtctcgagcg

SEQ ID NO: 821 - DNA, 355 bp, Homo sapiens
ggggtgcagctgttggagtctgggggaggcttggtacagcctggggggtccctgcgtctctcctgtgcagcctccggattcatctttgcttggtatgatatggggtgggcccgccaggctccagggaagggtctagagtgggtctcaaacattgattggcatggtaatgttacatactacgcagactccgtgaagggccggttcaccatctcccgcgacaattccaagaacacgctgtatctgcaaatgaacagcctgcgtgccgaggacaccgcggtatattactgtgcgacagcggaggacgagccggggtatgactactggggtcagggaaccctggtcaccgtctcgagcg

SEQ ID NO: 822 - DNA, 355 bp, Homo sapiens
ggggtgcagctgttggagtctgggggaggcttggtacagcctggggggtccctgcgtctctcctgtgcagcctccggattcatctttgcttggtatgatatggggtgggcccgccaggctccagggaagggtctagagtgggtctcatggattgattggcatggtaatgttacatactacgcagactccgtgaagggccggttcaccatctcccgcgacaattccaagaacacgctgtatctgcaaatgaacagcctgcgtgccgaggacaccgcggtatattactgtgcgacagcggaggacgagccggggtatgactactggggtcagggaaccctggtcaccgtctcgagcg

SEQ ID NO: 823 - DNA, 355 bp, Homo sapiens
ggggtgcagctgttggagtctgggggaggcttggtacagcctggggggtccctgcgtctctcctgtgcagcctccggattcatctttgcttggtatgatatggggtgggcccgccaggctccagggaagggtctagagtgggtctcaagaattgattggcatggtaatgttacatactacgcagactccgtgaagggccggttcaccatctcccgcgacaattccaagaacacgctgtatctgcaaatgaacagcctgcgtgccgaggacaccgcggtatattactgtgcgacagcggaggacgagccggggtatgactactggggtcagggaaccctggtcaccgtctcgagcg

SEQ ID NO: 824 - DNA, 355 bp, Homo sapiens
ggggtgcagctgttggagtctgggggaggcttggtacagcctggggggtccctgcgtctctcctgtgcagcctccggattcatctttgcttggtatgatatggggtgggcccgccaggctccagggaagggtctagagtgggtctcaagtattccgtggcatggtaatgttacatactacgcagactccgtgaagggccggttcaccatctcccgcgacaattccaagaacacgctgtatctgcaaatgaacagcctgcgtgccgaggacaccgcggtatattactgtgcgacagcggaggacgagccggggtatgactactggggtcagggaaccctggtcaccgtctcgagcg

SEQ ID NO: 825 - DNA, 355 bp, Homo sapiens
ggggtgcagctgttggagtctgggggaggcttggtacagcctggggggtccctgcgtctctcctgtgcagcctccggattcatctttgcttggtatgatatggggtgggcccgccaggctccagggaagggtctagagtgggtctcaagtatttggtggcatggtaatgttacatactacgcagactccgtgaagggccggttcaccatctcccgcgacaattccaagaacacgctgtatctgcaaatgaacagcctgcgtgccgaggacaccgcggtatattactgtgcgacagcggaggacgagccggggtatgactactggggtcagggaaccctggtcaccgtctcgagcg

SEQ ID NO: 826 - DNA, 355 bp, Homo sapiens
ggggtgcagctgttggagtctgggggaggcttggtacagcctggggggtccctgcgtctctcctgtgcagcctccggattcatctttgcttggtatgatatggggtgggcccgccaggctccagggaagggtctagagtgggtctcaagtattgtgtggcatggtaatgttacatactacgcagactccgtgaagggccggttcaccatctcccgcgacaattccaagaacacgctgtatctgcaaatgaacagcctgcgtgccgaggacaccgcggtatattactgtgcgacagcggaggacgagccggggtatgactactggggtcagggaaccctggtcaccgtctcgagcg

SEQ ID NO: 827 - DNA, 355 bp, Homo sapiens
ggggtgcagctgttggagtctgggggaggcttggtacagcctggggggtccctgcgtctctcctgtgcagcctccggattcatctttgcttggtatgatatggggtgggcccgccaggctccagggaagggtctagagtgggtctcaagtattatctggcatggtaatgttacatactacgcagactccgtgaagggccggttcaccatctcccgcgacaattccaagaacacgctgtatctgcaaatgaacagcctgcgtgccgaggacaccgcggtatattactgtgcgacagcggaggacgagccggggtatgactactggggtcagggaaccctggtcaccgtctcgagcg

SEQ ID NO: 828 - DNA, 355 bp, Homo sapiens
  misc_feature 249, 285, 318, 351, 355: n = A,T,C or G
ggggtgcagctgttggagtctgggggaggcttggtacagcctggggggtccctgcgtctctcctgtgcagcctccggattcatctttgcttggtatgatatggggtgggcccgccaggctccagggaagggtctagagtgggtctcaagtattcagtggcatggtaatgttacatactacgcagactccgtgaagggccggttcaccatctcccgcgacaattccaagaacacgctgtatctgcaaatnaacagcctgcgtgccgaggacaccccggtatattantgtgcgacagcggaggacgagccggggtatgantactggggtcagggaaccctggtcaccgttctngagn

SEQ ID NO: 829 - DNA, 355 bp, Homo sapiens
ggggtgcagctgttggagtctgggggaggcttggtacagcctggggggtccctgcgtctctcctgtgcagcctccggattcatctttgcttggtatgatatggggtgggcccgccaggctccagggaagggtctagagtgggtctcaagtattacgtggcatggtaatgttacatactacgcagactccgtgaagggccggttcaccatctcccgcgacaattccaagaacacgctgtatctgcaaatgaacagcctgcgtgccgaggacaccgcggtatattactgtgcgacagcggaggacgagccggggtatgactactggggtcagggaaccctggtcaccgtctcgagcg

SEQ ID NO: 830 - DNA, 355 bp, Homo sapiens
ggggtgcagctgttggagtctgggggaggcttggtacagcctggggggtccctgcgtctctcctgtgcagcctccggattcatctttgcttggtatgatatggggtgggcccgccaggctccagggaagggtctagagtgggtctcaagtattgagtggcatggtaatgttacatactacgcagactccgtgaagggccggttcaccatctcccgcgacaattccaagaacacgctgtatctgcaaatgaacagcctgcgtgccgaggacaccgcggtatattactgtgcgacagcggaggacgagccggggtatgactactggggtcagggaaccctggtcaccgtctcgagcg

SEQ ID NO: 831 - DNA, 355 bp, Homo sapiens
ggggtgcagctgttggagtctgggggaggcttggtacagcctggggggtccctgcgtctctcctgtgcagcctccggattcatctttgcttggtatgatatggggtgggcccgccaggctccagggaagggtctagagtgggtctcaagtattaggtggcatggtaatgttacatactacgcagactccgtgaagggccggttcaccatctcccgcgacaattccaagaacacgctgtatctgcaaatgaacagcctgcgtgccgaggacaccgcggtatattactgtgcgacagcggaggacgagccggggtatgactactggggtcagggaaccctggtcaccgtctcgagcg

SEQ ID NO: 832 - DNA, 355 bp, Homo sapiens
ggggtgcagctgttggagtctgggggaggcttggtacagcctggggggtccctgcgtctctcctgtgcagcctccggattcatctttgcttggtatgatatggggtgggcccgccaggctccagggaagggtctagagtgggtctcaagtattgcctggcatggtaatgttacatactacgcagactccgtgaagggccggttcaccatctcccgcgacaattccaagaacacgctgtatctgcaaatgaacagcctgcgtgccgaggacaccgcggtatattactgtgcgacagcggaggacgagccggggtatgactactggggtcagggaaccctggtcaccgtctcgagcg

SEQ ID NO: 833 - DNA, 355 bp, Homo sapiens
ggggtgcagctgttggagtctgggggaggcttggtacagcctggggggtccctgcgtctctcctgtgcagcctccggattcatctttgcttggtatgatatggggtgggcccgccaggctccagggaagggtctagagtgggtctcaagtattttctggcatggtaatgttacatactacgcagactccgtgaagggccggttcaccatctcccgcgacaattccaagaacacgctgtatctgcaaatgaacagcctgcgtgccgaggacaccgcggtatattactgtgcgacagcggaggacgagccggggtatgactactggggtcagggaaccctggtcaccgtctcgagcg

SEQ ID NO: 834 - DNA, 354 bp, Homo sapiens
ggggtgcagctgttggagtctgggggaggcttggtacagcctggggggtccctgcgtctctcctgtgcagcctccggattcatctttgcttggtatgatatggggtgggcccgccaggctccagggaagggtctagagtgggtctcaagtattgattggttgggtaatgttacatactacgcagactccgtgaagggccggttcaccatctcccgcgacaattccaagaacacgctgtatctgcaaatgaacagcctgcgtgccgaggacaccgcggtatattactgtgcgacagcggaggacgagccggggtatgactactggggtcagggaaccctggtcaccgtctcgagc

SEQ ID NO: 835 - DNA, 354 bp, Homo sapiens
ggggtgcagctgttggagtctgggggaggcttggtacagcctggggggtccctgcgtctctcctgtgcagcctccggattcatctttgcttggtatgatatggggtgggcccgccaggctccagggaagggtctagagtgggtctcaagtattgattggatgggtaatgttacatactacgcagactccgtgaagggccggttcaccatctcccgcgacaattccaagaacacgctgtatctgcaaatgaacagcctgcgtgccgaggacaccgcggtatattactgtgcgacagcggaggacgagccggggtatgactactggggtcagggaaccctggtcaccgtctcgagc

SEQ ID NO: 836 - DNA, 354 bp, Homo sapiens
ggggtgcagctgttggagtctgggggaggcttggtacagcctggggggtccctgcgtctctcctgtgcagcctccggattcatctttgcttggtatgatatggggtgggcccgccaggctccagggaagggtctagagtgggtctcaagtattgattggaggggtaatgttacatactacgcagactccgtgaagggccggttcaccatctcccgcgacaattccaagaacacgctgtatctgcaaatgaacagcctgcgtgccgaggacaccgcggtatattactgtgcgacagcggaggacgagccggggtatgactactggggtcagggaaccctggtcaccgtctcgagc

SEQ ID NO: 837 - DNA, 354 bp, Homo sapiens
ggggtgcagctgttggagtctgggggaggcttggtacagcctggggggtccctgcgtctctcctgtgcagcctccggattcatctttgcttggtatgatatggggtgggcccgccaggctccagggaagggtctagagtgggtctcaagtattgattggtggggtaatgttacatactacgcagactccgtgaagggccggttcaccatctcccgcgacaattccaagaacacgctgtatctgcaaatgaacagcctgcgtgccgaggacaccgcggtatattactgtgcgacagcggaggacgagccggggtatgactactggggtcagggaaccctggtcaccgtctcgagc

SEQ ID NO: 838 - DNA, 354 bp, Homo sapiens
ggggtgcagctgttggagtctgggggaggcttggtacagcctggggggtccctgcgtctctcctgtgcagcctccggattcatctttgcttggtatgatatggggtgggcccgccaggctccagggcagggtctagagtgggtctcaagtattgattgggacggtaatgttacatactacgcagactccgtgaagggccggttcaccatctcccgcgacaattccaagaacacgctgtatctgcaaatgaacagcctgcgtgccgaggacaccgcggtatattactgtgcgacagcggaggacgagccggggtatgactactggggtcagggaaccctggtcaccgtctcgagc

SEQ ID NO: 839 - DNA, 354 bp, Homo sapiens
ggggtgcagctgttggagtctgggggaggcttggtacagcctggggggtccctgcgtctctcctgtgcagcctccggattcatctttgcttggtatgatatggggtgggcccgccaggccccagggaagggtctagagtgggtctcaagtattgattggtccggtaatgttacatactacgcagactccgtgaagggccggttcaccatctcccgcgacaattccaagaacacgctgtatctgcaaatgaacagcctgcgtgccgaggacaccgcggtatattactgtgcgacagcggaggacgagccggggtatgactactggggtcagggaaccctggtcaccgtctcgagc

SEQ ID NO: 840 - DNA, 354 bp, Homo sapiens
ggggtgcagctgttggagtctgggggaggcttggtacagcctggggggtccctgcgtctctcctgtgcagcctccggattcatctttgcttggtatgatatggggtgggcccgccaggctccagggaagggtctagagtgggtctcaagtattgattgggcgggtaatgttacatactacgcagactccgtgaagggccggttcaccatctcccgcgacaattccaagaacacgctgtatctgcaaatgaacagcctgcgtgccgaggacaccgcggtatattactgtgcgacagcggaggacgagccggggtatgactactggggtcagggaaccctggtcaccgtctcgagc

SEQ ID NO: 841 - DNA, 354 bp, Homo sapiens
ggggtgcagctgttggagtctgggggaggcttggtacagcctggggggtccctgcgtctctcctgtgcagcctccggattcatctttgcttggtatgatatggggtgggcccgccaggctccagggaagggtctagagtgggtctcaagtattgattggccaggtaatgttacatactacgcagactccgtgaagggccggttcaccatctcccgcgacaattccaagaacacgctgtatctgcaaatgaacagcctgcgtgccgaggacaccgcggtatattactgtgcgacagcggaggacgagccggggtatgactactggggtcagggaaccctggtcaccgtctcgagc

SEQ ID NO: 842 - DNA, 354 bp, Homo sapiens
ggggtgcagctgttggagtctgggggaggcttggtacagcctggggggtccctgcgtctctcctgtgcagcctccggattcatctttgcttggtatgatatggggtgggcccgccaggctccagggaagggtctagagtgggtctcaagtattgattgggtgggtaatgttacatactacgcagactccgtgaagggccggttcaccatctcccgcgacaattccaagaacacgctgtatctgcaaatgaacagcctgcgtgccgaggacaccgcggtatattactgtgcgacagcggaggacgagccggggtatgactactggggtcagggaaccctggtcaccgtctcgagc

SEQ ID NO: 843 - DNA, 354 bp, Homo sapiens
ggggtgcagctgttggagtctgggggaggcttggtacagcctggggggtccctgcgtctctcctgtgcagcctccggattcatctttgcttggtatgatatggggtgggcccgccaggctccagggaagggtctagagtgggtctcgagtattgattggacgggtaatgttacatactacgcagactccgtgaagggccggttcaccatctcccgcgacaattccaagaacacgctgtatctgcaaatgaacagcctgcgtgccgaggacaccgcggtatattactgtgcgacagcggaggacgagccggggtatgactactggggtcagggaaccctggtcaccgtctcgagc

SEQ ID NO: 844 - DNA, 354 bp, Homo sapiens
ggggtgcagctgttggagtctgggggaggcttggtacagcctggggggtccctgcgtctctcctgtgcagcctccggattcatctttgcttggtatgatatggggtgggcccgccaggctccagggaagggtctagagtgggtctcaagtattgattgggggggtaatgttacatactacgcagactccgtgaagggccggttcaccatctcccgcgacaattccaagaacacgctgtatctgcaaatgaacagcctgcgtgccgaggacaccgcggtatattactgtgcgacagcggaggacgagccggggtatgactactggggtcagggaaccctggtcaccgtctcgagc

SEQ ID NO: 845 - DNA, 354 bp, Homo sapiens
ggggtgcagctgttggagtctgggggaggcttggtacagcctggggggtccctgcgtctctcctgtgcagcctccggattcatctttgcttggtatgatatggggtgggcccgccaggctccagggaagggtctggagtgggtctcaagtattgattggtacggtaatgttacatactacgcagactccgtgaagggccggttcaccatctcccgcgacaattccaagaacacgctgtatctgcaaatgaacagcctgcgtgccgaggacaccgcggtatattactgtgcgacagcggaggacgagccggggtatgactactggggtcagggaaccctggtcaccgtctcgagc

SEQ ID NO: 846 - DNA, 354 bp, Homo sapiens
ggggtgcagctgttggagtctgggggaggcttggtacagcctggggggtccctgcgtctctcctgtgcagcctccggattcatctttgcttggtatgatatggggtgggcccgccaggctccagggaagggtctagagtgggtctcaagtattgattggaacggtaatgttacatactacgcagactccgtgaagggccggttcaccatctcccgcgacaattccaagaacacgctgtatctgcaaatgaacagcctgcgtgccgaggacaccgcggtatattactgtgcgacagcggaggacgagccggggtatgactactggggtcagggaaccctggtcaccgtctcgagc

SEQ ID NO: 847 - DNA, 354 bp, Homo sapiens
ggggtgcagctgttggagtctgggggaggcttggtacagcctggggggtccctgcgtctctcctgtgcagcctccggattcatctttgcttggtatgatatggggtgggcccgccaggctccagggaagggtctagagtgggtctcaagtattgattggcatggtaatgggacatactacgcagactccgtgaagggccggttcaccatctcccgcgacaattccaagaacacgctgtatctgcaaatgaacagcctgcgtgccgaggacaccgcggtatattactgtgcgacagcggaggacgagccggggtatgactactggggtcagggaaccctggtcaccgtctcgagc

SEQ ID NO: 848 - DNA, 354 bp, Homo sapiens
ggggtgcagctgttggagtctgggggaggcttggtacagcctggggggtccctgcgtctctcctgtgcagcctccggattcatctttgcttggtatgatatggggtgggcccgccaggctccagggaagggtctagagtgggtctcaagtattgattggcatggtaatctcacatactacgcagactccgtgaagggccggttcaccatctcccgcgacaattccaagaacacgctgtatctgcaaatgaacagcctgcgtgccgaggacaccgcggtatattactgtgcgacagcggaggacgagccggggtatgactactggggtcagggaaccctggtcaccgtctcgagc

SEQ ID NO: 849 - DNA, 354 bp, Homo sapiens
ggggtgcagctgttggagtctgggggaggcttggtacagcctggggggtccctgcgtctctcctgtgcagcctccggattcatctttgcttggtatgatatggggtgggcccgccaggctccagggaagggtctagagtgggtctcaagtattgattggcatggtaatatgacatactacgcagactccgtgaagggccggttcaccatctcccgcgacaattccaagaacacgctgtatctgcaaatgaacagcctgcgtgccgaggacaccgcggtatattactgtgcgacagcggaggacgagccggggtatgactactggggtcagggaaccctggtcaccgtctcgagc

SEQ ID NO: 850 - DNA, 354 bp, Homo sapiens
ggggtgcagctgttggagtctgggggaggcttggtacagcctggggggtccctgcgtctctcctgtgcagcctccggattcatctttgcttggtatgatatggggtgggcccgccaggctccagggaagggtctagagtgggtctcaagtattgattggcatggtaataggacatactacgcagactccgtgaagggccggttcaccatctcccgcgacaattccaagaacacgctgtatctgcaaatgaacagcctgcgtgccgaggacaccgcggtatattactgtgcgacagcggaggacgagccggggtatgactactggggtcagggaaccctggtcaccgtctcgagc

SEQ ID NO: 851 - DNA, 354 bp, Homo sapiens
ggggtgcagctgttggagtctgggggaggcttggtacagcctggggggtccctgcgtctctcctgtgcagcctccggattcatctttgcttggtatgatatggggtgggcccgccaggctccagggaagggtctagagtgggtctcaagtattgattggcatggtaattacacatactacgcagactccgtgaagggccggttcaccatctcccgcgacaattccaagaacacgctgtatctgcaaatgaacagcctgcgtgccgaggacaccgcggtatattactgtgcgacagcggaggacgagccggggtatgactactggggtcagggaaccctggtcaccgtctcgagc

SEQ ID NO: 852 - DNA, 354 bp, Homo sapiens
ggggtgcagctgttggagtctgggggaggcttggtacagcctggggggtccctgcgtctctcctgtgcagcctccggattcatctttgcttggtatgatatggggtgggcccgccaggctccagggaagggtctagagtgggtctcaagtattgattggcatggtaatttcacatactacgcagactccgtgaagggccggttcaccatctcccgcgacaattccaagaacacgctgtatctgcaaatgaacagcctgtgtgccgaggacaccgcggtatattactgtgcgacagcggaggacgagccggggtatgactactggggtcagggaaccctggtcaccgtctcgagc

SEQ ID NO: 853 - DNA, 354 bp, Homo sapiens
ggggtgcagctgttggagtctgggggaggcttggtacagcctggggggtccctgcgtctctcctgtgcagcctccggactcatctttgcttggtatgatatggggtgggcccgccaggctccagggaagggtctggagtgggtctcaagtattgattggcatggtaataagacatactacgcagactccgtgaagggccggttcaccatctcccgcgacaattccaagaacacgctgtatctgcaaatgaacagcctgcgtgccgaggacaccgcggtatattactgtgcgacagcggaggacgagccggggtatgactactggggtcagggaaccctggtcaccgtctcgagc

SEQ ID NO: 854 - DNA, 354 bp, Homo sapiens
ggggtgcagctgttggagtctgggggaggcttggtacagcctggggggtccctgcgtctctcctgtgcagcctccggattcatctttgcttggtatgatatggggtgggcccgccaggctccagggaagggtctagagtgggtctcaagtattgattggcatggtaattcgacatactacgcagactccgtgaagggccggttcaccatctcccgcgacaattccaagaacacgctgtatctgcaaatgaacagcctgcgtgccgaggacaccgcggtatattactgtgcgacagcggaggacgagccggggtatgactactggggtcaggggaccctggtcaccgtctcgagc

SEQ ID NO: 855 - DNA, 354 bp, Homo sapiens
ggggtgcagctgttggagtctgggggaggcttggtacagcctggggggtccctgcgtctctcctgtgcagcctccggattcatctttgcttggtatgatatggggtgggcccgccaggctccagggaagggtctagagtgggtctcaagtattgattggcatggtaatgccacatactacgcagactccgtgaagggccggttcaccatctcccgcgacaattccaagaacacgctgtatctgcaaatgaacagcctgcgtgccgaggacaccgcggtatattactgtgcgacagcggaggacgagccggggtatgactactggggtcagggaaccctggtcaccgtctcgagc

SEQ ID NO: 856 - DNA, 354 bp, Homo sapiens
ggggtgcagctgttggagtctgggggaggcttggtacagcctggggggtccctgcgtctctcctgtgcagcctccggattcatctttgcttggtatgatatggggtgggcccgccaggctccagggaagggtctagagtgggtctcaagtattgattggcatggtaatacgacatactacgcagactccgtgaagggccggttcaccatctcccgcgacaattccaagaacacgctgtatctgcaaatgaacagcctgcgtgccgaggacaccgcggtatattactgtgcgacagcggaggacgagccggggtatgactactggggtcagggaaccctggtcaccgtctcgagc

SEQ ID NO: 857 - DNA, 354 bp, Homo sapiens
ggggtgcagctgttggagtctgggggaggcttggtacagcctggggggtccctgcgtctctcctgtgcagcctccggattcatctttgcttggtatgatatggggtgggcccgccaggctccagggaagggtctagagtgggtctcaagtattgattggcatggtaataacacatactacgcagactccgtgaagggccggttcaccatctcccgcgacaattccaagaacacgctgtatctgcaaatgaacagcctgcgtgccgaggacaccgcggtatattactgtgcgacagcggaggacgagccggggtatgactactggggtcagggaaccctggtcaccgtctcgagc

SEQ ID NO: 858 - DNA, 354 bp, Homo sapiens
ggggtgcagctgttggagtctgggggaggcttggtacagcctggggggtccctgcgtctctcctgtgcagcctccggattcatctttgcttggtatgatatggggtgggcccgccaggctccagggaagggtctagagtgggtctcaagtattgattggcatggtaattggacatactacgcagactccgtgaagggccggttcaccatctcccgcgacaattccaagaacacgctgtatctgcaaatgaacagcctgcgtgccgaggacaccgcggtatattactgtgcgacagcggaggacgagccggggtatgactactggggtcagggaaccctggtcaccgtctcgagc

SEQ ID NO: 859 - DNA, 355 bp, Homo sapiens
ggggtgcagctgttggagtctgggggaggcttggtacagcctggggggtccctgcgtctctcctgtgcagcctccggattcatctttgcttggtatgatatggggtgggcccgccaggctccagggaagggtctagagtgggtctcaagtattgattggcatggttcggttacatactacgcagactccgtgaagggccggttcaccatctcccgcgacaattccaagaacacgctgtatctgcaaatgaacagcctgcgtgccgaggacaccgcggtatattactgtgcgacagcggaggacgagccggggtatgactactggggtcagggaaccctggtcaccgtctcgagcg

SEQ ID NO: 860 - DNA, 355 bp, Homo sapiens
ggggtgcagctgttggagtctgggggaggcttggtacagcctggggggtccctgcgtctctcctgtgcagcctccggattcatctttgcttggtatgatatggggtgggcccgccaggctccagggaagggtctagagtgggtctcaagtattgattggcatggtcaggttacatactacgcagactccgtgaagggccggttcaccatctcccgcgacaattccaagaacacgctgtatctgcaaatgaacagcctgcgtgccgaggacaccgcggtatattactgtgcgacagcggaggacgagccggggtatgactactggggtcagggaaccctggtcaccgtctcgagcg

SEQ ID NO: 861 - DNA, 355 bp, Homo sapiens
ggggtgcagctgttggagtctgggggaggcttggtacagcctggggggtccctgcgtctctcctgtgcagcctccggattcatctttgcttggtatgatatggggtgggtccgccaggctccagggaagggtctagagtgggtctcaagtattgattggcatggtctggttacatactacgcagactccgtgaagggccggttcaccatctcccgcgacaattccaagaacacgctgtatctgcaaatgaacagcctgcgtgccgaggacaccgcggtatattactgtgcgacagcggaggacgagccggggtatgactactggggtcagggaaccctggtcaccgtctcgagcg

SEQ ID NO: 862 - DNA, 355 bp, Homo sapiens
ggggtgcagctgttggagtctgggggaggcttggtacagcctggggggtccctgcgtctctcctgtgcagcctccggattcatctttgcttggtatgatatggggtgggcccgccaggctccagggaagggtctagagtgggtctcaagtattgattggcatggtaaggttacatactacgcagactccgtgaagggccggttcaccatctcccgcgacaattccaagaacacgctgtatctgcaaatgaacagcctgcgtgccgaggacaccgcggtatattactgtgcgacagcggaggacgagccggggtatgactactggggtcagggaaccctggtcaccgtctcgagcg

SEQ ID NO: 863 - DNA, 355 bp, Homo sapiens
ggggtgcagctgttggagtctgggggaggcttggtacagcctggggggtccctgcgtctctcctgtgcagcctccggattcatctttgcttggtatgatatggggtgggcccgccaggctccagggaagggtctagagtgggtctcaagtattgattggcatggttgggttacatactacgcagactccgtgaaaggccggttcaccatctcccgcgacaattccaagaacacgctgtatctgcaaatgaacagcctgcgtgccgaggacaccgcggtatattactgtgcgacagcggaggacgagccggggtatgactactggggtcagggaaccctggtcaccgtctcgagcg

SEQ ID NO: 864 - DNA, 355 bp, Homo sapiens
ggggtgcagctgttggagtctgggggaggcttggtacagcctggggggtccctgcgtctctcctgtgcagcctccggattcatctttgcttggtatgatatggggtgggcccgccaggctccagggaagggtctagagtgggtctcaagtattgattggcatggtggggttacatactacgcagactccgtgaagggccggttcaccatctcccgcgacaattccaagaacacgctgtatctgcaaatgaacagcctgcgtgccgaggacaccgcggtatattactgtgcgacagcggaggacgagccggggtatgactactggggtcagggaaccctggtcaccgtctcgagcg

SEQ ID NO: 865 - DNA, 355 bp, Homo sapiens
ggggtgcagctgttggagtctgggggaggcttggtacagcctggggggtccctgcgtctctcctgtgcagcctccggattcatctttgcttggtatgatatggggtgggcccgccaggctccagggaagggtctagagtgggtctcaagtattgattggcatggtcacgttacatactacgcagactccgtgaagggccggttcaccatctcccgcgacaattccaagaacacgctgtatctgcaaatgaacagcctgcgtgccgaggacaccgcggtatattactgtgcgacagcggaggacgagccggggtatgactactggggtcagggaaccctggtcaccgtctcgagcg

SEQ ID NO: 866 - DNA, 355 bp, Homo sapiens
ggggtgcagctgttggagtctgggggaggcttggtacagcctggggggtccctgcgtctctcctgtgcagcctccggattcatctttgcttggtatgatatggggtgggcccgccaggctccagggaagggtctagagtgggtctcaagtattgattggcatggtgaggttacatactacgcagactccgtgaagggccggttcaccatctcccgcgacaattccaagaacacgctgtatctgcaaatgaacagcctgcgtgccgaggacaccgcggtatattactgtgcgacagcggaggacgagccggggtatgactactggggccagggaaccctggtcaccgtctcgagcg

SEQ ID NO: 867 - DNA, 355 bp, Homo sapiens
ggggtgcagctgttggagtctgggggaggcttggtacagcctggggggtccctgcgtctctcctgtgcagcctccggattcatctttgcttggtatgatatggggtgggcccgccaggctccagggaagggtctagagtgggtctcaagtattgattggcatggtagggttacatactacgcagactccgtgaagggccggttcaccatctcccgcgacaattccaagaacacgctgtatctgcaaatgaacagcctgcgtgccgaggacaccgcggtatattactgtgcgacagcggaggacgagccggggtatgactactggggtcagggaaccctggtcaccgtactcgagc

SEQ ID NO: 868 - DNA, 355 bp, Homo sapiens
ggggtgcagctgttggagtctgggggaggcttggtacagcctggggggtccctgcgtctctcctgtgcagcctccggattcatctttgcttggtatgatatggggtgggcccgccaggctccagggaagggtctagagtgggtctcaagtattgattggcatggtgtcgttacatactacgcagactccgtgaagggccggttcaccatctcccgcgacaattccaagaacacgctgtatctgcaaatgaacagcctgcgtgccgaggacaccgcggtatattactgtgcgacagcggaggacgagccggggtatgactactggggtcagggaaccctggtcaccgtctcgagcg

SEQ ID NO: 869 - DNA, 355 bp, Homo sapiens
ggggtgcagctgttggagtctgggggaggcttggtacagcctggggggtccctgcgtctctcctgtgcagcctccggattcatctttgcttggtatgatatggggtgggcccgccaggctccagggaagggtctagagtgggtctcaagtattgattggcatggttgcgttacatactacgcagactccgtgaagggccggttcaccatctcccgcgacaattccaagaacacgctgtatctgcaaatgaacagcctgcgtgccgaggacaccgcggtatattactgtgcgacagcggaggacgagccggggtatgactactggggtcagggaaccctggtcaccgtctcgagcg

SEQ ID NO: 870 - DNA, 355 bp, Homo sapiens
ggggtgcagctgttggagtctgggggaggcttggtacagcctggggggtccctgcgtctctcctgtgcagcctccggattcatctttgcttggtatgatatggggtgggcccgccaggctccagggaagggtctagagtgggtctcaagtattgattggcatggttacgttacatactacgcagactccgtgaagggccggttcaccatctcccgcgacaattccaagaacacgctgtatctgcaaatgaacagcctgcgtgccgaggacaccgcggtatattactgtgcgacagcggaggacgagccggggtatgactactggggtcagggaaccctggtcaccgtctcgagcg

SEQ ID NO: 871 - DNA, 355 bp, Homo sapiens
ggggtgcagctgttggagtctgggggaggcttggtacagcctggggggtccctgcgtctctcctgtgcagcctccggattcatctttgcttggtatgatatggggtgggcccgccaggctccagggaagggtctagagtgggtctcaagtattgattggcatggtgacgttacatactacgcagactccgtgaagggccggttcaccatctcccgcgacaattccaagaacacgctgtatctgcaaatgaacagcctgcgtgccgaggacaccgcggtatattactgtgcgacagcggaggacgagccggggtatgactactggggtcagggaaccctggtcaccgtctcgagcg

SEQ ID NO: 872 - DNA, 355 bp, Homo sapiens
ggggtgcagctgttggagtctgggggaggcttggtacagcctggggggtccctgcgtctctcctgtgcagcctccggattcatctttgcttggtatgatatggggtgggcccgccaggctccagggaagggtctagagtgggtctcaagtattgattggcatggtaccgttacatactacgcagactccgtgaagggccggttcaccatctcccgcgacaattccaagaacacgctgtatctgcaaatgaacagcctgcgtgccgaggacaccgcggtatattactgtgcgacagcggaggacgagccggggtatgactactggggtcagggaaccctggtcaccgtctcgagcg

SEQ ID NO: 873 - DNA, 355 bp, Homo sapiens
ggggtgcagctgttggagtctgggggaggcttggtacagcctggggggtccctgcgtctctcctgtgcagcctccggattcatctttgcttggtatgatatggggtgggcccgccaggctccagggaagggtctagagtgggtctcaagtattgattggcatggtatggttacatactacgcagactccgtgaagggccggttcaccatctcccgcgacaattccaagaacacgctgtatctgcaaatgaacagcctgcgtgccgaggacaccgcggtatattactgtgcgacagcggaggacgagccggggtatgactactggggtcagggaaccctggtcaccgtctcgagcg

SEQ ID NO: 874 - DNA, 355 bp, Homo sapiens
ggggtgcagctgttggagtctgggggaggcttggtacagcctggggggtccctgcgtctctcctgtgcagcctccggattcatctttaactggtatgatatggggtgggcccgccaggctccagggaagggtctagagtgggtctcaagtattgattggcatggtaatgttacatactacgcagactccgtgaagggccggttcaccatctcccgcgacaattccaagaacacgctgtatctgcaaatgaacagcctgcgtgccgaggacaccgcggtatattactgtgcgacagcggaggacgagccggggtatgactactggggtcagggaaccctggtcaccgtctcgagcg

SEQ ID NO: 875 - DNA, 355 bp, Homo sapiens
ggggtgcagctgttggagtctgggggaggcttggtacagcctggggggtccctgcgtctctcctgtgcagcctccggattcatctttcactggtatgatatggggtgggtccgccaggctccagggaagggtctagagtgggtctcaagtattgattggcatggtaatgttacatactacgcagactccgtgaagggccggttcaccatctcccgcgacaattccaagaacacgctgtatctgcaaatgaacagcctgcgtgccgaggacaccgcggtatattactgtgcgacagcggaggacgagcccgggtatgactactggggtcagggaaccctggtcaccgtctcgagcg

SEQ ID NO: 876 - DNA, 355 bp, Homo sapiens
ggggtgcagctgttggagtctgggggaggcttggtacagcctggggggtccctgcgtctctcctgtgcagcctccggattcatctttcagtggtatgatatggggtgggcccgccaggctccagggaagggtctggagtgggtctcaagtattgattggcatggtgatgttacatactacgcagactctgtgaagggccggttcaccatctcccgcgacaattccaagaacacgctgtatctgcaaatgaacagcctgcgtgccgaggacaccgcggtatattactgtgcgacagcggaggacgagccggggtatgactactggggtcagggaaccctggtcaccgtctcgagcg

SEQ ID NO: 877 - DNA, 355 bp, Homo sapiens
ggggtgcagctgttggagtctgggggaggcttggtacagcctggggggtccctgcgtctctcctgtgcagcctccggattcatctttacctggtatgatatggggtgggcccgccaggctccagggaagggtctagagtgggtctcaagtattgattggcatggtaatgttacgtactacgcagactccgtgaagggccggttcaccatctcccgcgacaattccaagaacacgctgtatctgcaaatgaacagcctgcgtgccgaggacaccgcggtatattactgtgcgacagcggaggacgagccggggtatgactactggggtcagggaaccctggtcaccgtctcgagcg

SEQ ID NO: 878 - DNA, 355 bp, Homo sapiens
ggggtgcagctgttggagtctgggggaggcttggtacagcctggggggtccctgcgtctctcctgtgcagcctccggattcatctttgtgtggtatgatatggggtgggcccgccaggctccagggaagggtctagagtgggtctcaagtattgattggcatggtaatgttacatactacgcagactctgtgaagggccggttcaccatctcccgcgacaattccaagaacacgctgtatctgcaaatgaacagcctgcgtgccgaggacaccgcggtatattactgtgcgacagcggaggacgagccggggtatgactactggggtcagggaaccctggtcaccgtctcgagcg

SEQ ID NO: 879 - DNA, 355 bp, Homo sapiens
ggggtgcagctgttggagtctgggggaggcttggtacagcctggggggtccctgcgtctctcctgtgcagcctccggattcatcttttactggtatgatatggggtgggcccgccaggctccagggaagggtctagagtgggtctcaagtattgattggcatggtaatgttacatactacgcagactccgtgaagggccggttcaccatctcccgcgacaattccaagaacacgctgtatctgcaaatgaacagcctgcgtgccgaggacaccgcggtatattactgtgcgacagcggaggacgagccggggtatgactactggggtcagggaaccctggtcaccgtctcgagcg

SEQ ID NO: 880 - DNA, 355 bp, Homo sapiens
  misc_feature 347, 349: n = A,T,C or G
ggggtgcagctgttggagtctgggggaggcttggtacagcctggggggtccctgcgtctctcctgtgcagcctccggattcatctttgctgtgtatgatatggggtgggcccgccaggctccagggaagggtctagagtgggtctcaagtattgattggcatggtaatgttacatactacgcagactccgtgaagggccggttcaccatctcccgcgacaattccaagaacacgctgtatctgcaaatgaacagcctgcgtgccgaggacaccgcggtatattactgtgcgacagcggaggacgagccggggtatgactactggggtcagggaaccctggtcaccgnantcgagc

SEQ ID NO: 881 - DNA, 354 bp, Homo sapiens
ggggtgcagctgttggagtctgggggaggcttggtacagcctggggggtccctgcgtctctcctgtgcagcctccggattcatctttgcttggtatgatatgatgtgggcccgccaggctccagggaagggtctagagtgggtctcaagtattgattggcatggtaatgttacatactacgcagactccgtgaagggccggttcaccatctcccgcgacaattccaagaacacgctgtatctgcaaatgaacagcctgcgtgccgaggacaccgcggtatattactgtgcgacagcggaggacgagccggggtatgactactggggtcagggaaccctggtcaccgtctcgagc

SEQ ID NO: 882 - DNA, 354 bp, Homo sapiens
ggggtgcagctgttggagtctgggggaggcttggtacagcctggggggtccctgcgtctctcctgtgcagcctccggattcatctttgcttggtatgatatgtactgggtccgccaggctccagggaagggtctagagtgggtctcaagtattgattggcatggtaatgttacatactacgcagactccgtgaagggccggttcaccatctcccgcgacaattccaagaacacgctgtatctgcaaatgaacagcctgcgtgccgaggacaccgcggtatattactgtgcgacagcggaggacgagccggggtatgactactggggtcagggaaccctggtcaccgtactcgag

SEQ ID NO: 883 - DNA, 354 bp, Homo sapiens
ggggtgcagctgttggagtctgggggaggcttggtacagcctggggggtccctgcgtctctcctgtgcagcctccggattcatctttgcttggtatgcgatggggtgggcccgccaggctccagggaagggtctagagtgggtctcaagtattgattggcatggtaatgttacatactacgcagactccgtgaagggccggttcaccatctcccgcgacaattccaagaacacgctgtatctgcaaatgaacagcctgcgtgccgaggacaccgcggtatattactgtgcgacagcggaggacgagccggggtatgactacttgggtcagggaaccctggtcaccgtctcgagc

SEQ ID NO: 884 - DNA, 354 bp, Homo sapiens
ggggtgcagctgttggagtctgggggaggcttggtacagcctggggggtccctgcgtctctcctgtgcagcctccggattcatctttgcttggtatgatatgcagtgggcccgccaggctccagggaagggtctagagtgggtctcaagtattgattggcatggtaatgttacatactacgcagactccgtgaagggccggttcaccatctcccgcgacaattccaagaacacgctgtatctgcaaatgaacagcctgcgtgccgaggacaccgcggtatattactgtgcgacagcggaggacgagccggggtatgactactggggtcagggaaccctggtcaccgtctcgagc

SEQ ID NO: 885 - DNA, 354 bp, Homo sapiens
gaggtgcagctgttggagtctgggggaggcttggtacagcctggggggtccctgcgtctctcctgtgcagcctccggattcatctttgcttggtatgatatggggtgggcccgccaggctccagggaagggtctagagtgggtctcaagtattgattggcatggtaatgttacatactacgcagactccgtgaagggccggttcaccatctcccgcgacaattccaagaacacgctgtatctgcaaatgaacagcctgcgtgccgaggacaccgcggtatattactgtgcgacagcggaggacgagccggggtatgactactggggtcagggaaccctggtcaccgtctcgagc

SEQ ID NO: 886 - DNA, 354 bp, Homo sapiens
gaggtgcagctgttggagtctgggggaggcttggtacagcctggggggtccctgcgtctctcctgtgcagcctccggattcatctttgcttggtatgatatggggtgggcccgccaggctccagggaagggtctagagtgggtctcaagtattgattggaggggtaatgttacatactacgcagactccgtgaagggccggttcaccatctcccgcgacaattccaagaacacgctgtatctgcaaatgaacagcctgcgtgccgaggacaccgcggtatattactgtgcgacagcggaggacgagccggggtatgactactggggtcagggaaccctggtcaccgtctcgagc

SEQ ID NO: 887 - DNA, 354 bp, Homo sapiens
ggggtgcagctgttggagtctgggggaggcttggtacagcctggggggtccctgcgtctctcctgtgcagcctccggattcatctttgcttggtatgatatggggtgggtccgccaggctccagggaagggtctagagtgggtctcaagtattgattggcatggtaatgttacatactacgcagactccgtgaagggccggttcaccatctcccgcgacaattccaagaacacgctgtatctgcaaatgaacagcctgcgtgccgaggacaccgcggtatattactgtgcgacagcggaggacgagccggggtatgactactggggtcagggaaccctggtcaccgtctcgagc

SEQ ID NO: 888 - DNA, 354 bp, Homo sapiens
ggggtgcagctgttggagtctgggggaggcttggtacagcctggggggtccctgcgtctctcctgtgcagcctccggattcatctttgcttggtatgatatggggtgggtccgccaggctccagggaagggtctagagtgggtctcaagtattgattggaggggtaatgttacatactacgcagactccgtgaagggccggttcaccatctcccgcgacaattccaagaacacgctgtatctgcaaatgaacagcctgcgtgccgaggacaccgcggtatattactgtgcgacagcggaggacgagccggggtatgactactggggtcagggaaccctggtcaccgtctcgagc

SEQ ID NO: 889 - DNA, 354 bp, Homo sapiens
gaggtgcagctgttggagtctgggggaggcttggtacagcctggggggtccctgcgtctctcctgtgcagcctccggattcatctttgcttggtatgatatggggtgggtccgccaggctccagggaagggtctagagtgggtctcaagtattgattggcatggtaatgttacatactacgcagactccgtgaagggccggttcaccatctcccgcgacaattccaagaacacgctgtatctgcaaatgaacagcctgcgtgccgaggacaccgcggtatattactgtgcgacagcggaggacgagccggggtatgactactggggtcagggaaccctggtcaccgtctcgagc

SEQ ID NO: 890 - DNA, 354 bp, Homo sapiens
gaggtgcagctgttggagtctgggggaggcttggtacagcctggggggtccctgcgtctctcctgtgcagcctccggattcatctttgcttggtatgatatggggtgggtccgccaggctccagggaagggtctagagtgggtctcaagtattgattggaggggtaatgttacatactacgcagactccgtgaagggccggttcaccatctcccgcgacaattccaagaacacgctgtatctgcaaatgaacagcctgcgtgccgaggacaccgcggtatattactgtgcgacagcggaggacgagccggggtatgactactggggtcagggaaccctggtcaccgtctcgagc

SEQ ID NO: 891 - DNA, 354 bp, Homo sapiens
gaggtgcagctgttggagtctgggggaggcttggtacagcctggggggtccctgcgtctctcctgtgcagcctccggattcatctttgcttggtatgatatggggtgggcccgccaggctccagggaagggtctagagtgggtctcaagtattgattggcatggtgaggttacatactacgcagactccgtgaagggccggttcaccatctcccgcgacaattccaagaacacgctgtatctgcaaatgaacagcctgcgtgccgaggacaccgcggtatattactgtgcgacagcggaggacgagccggggtatgactactggggccagggaaccctggtcaccgtctcgagc

SEQ ID NO: 892 - DNA, 354 bp, Homo sapiens
ggggtgcagctgttggagtctgggggaggcttggtacagcctggggggtccctgcgtctctcctgtgcagcctccggattcatctttgcttggtatgatatggggtgggtccgccaggctccagggaagggtctagagtgggtctcaagtattgattggcatggtgaggttacatactacgcagactccgtgaagggccggttcaccatctcccgcgacaattccaagaacacgctgtatctgcaaatgaacagcctgcgtgccgaggacaccgcggtatattactgtgcgacagcggaggacgagccggggtatgactactggggccagggaaccctggtcaccgtctcgagc

SEQ ID NO: 893 - DNA, 354 bp, Homo sapiens
gaggtgcagctgttggagtctgggggaggcttggtacagcctggggggtccctgcgtctctcctgtgcagcctccggattcatctttgcttggtatgatatggggtgggtccgccaggctccagggaagggtctagagtgggtctcaagtattgattggcatggtgaggttacatactacgcagactccgtgaagggccggttcaccatctcccgcgacaattccaagaacacgctgtatctgcaaatgaacagcctgcgtgccgaggacaccgcggtatattactgtgcgacagcggaggacgagccggggtatgactactggggccagggaaccctggtcaccgtctcgagc

SEQ ID NO: 894 - DNA, 355 bp, Homo sapiens
ggggtgcagctgttggagtctgggggaggcttggtacagcctggggggtccctgcgtctctcctgtgcagcctccggattcatctttcagtggtatgatatggggtgggtccgccaggctccagggaagggtctggagtgggtctcaagtattgattggcatggtgatgttacatactacgcagactctgtgaagggccggttcaccatctcccgcgacaattccaagaacacgctgtatctgcaaatgaacagcctgcgtgccgaggacaccgcggtatattactgtgcgacagcggaggacgagccggggtatgactactggggtcagggaaccctggtcaccgtctcgagcg

SEQ ID NO: 895 - DNA, 355 bp, Homo sapiens
gaggtgcagctgttggagtctgggggaggcttggtacagcctggggggtccctgcgtctctcctgtgcagcctccggattcatctttcagtggtatgatatggggtgggtccgccaggctccagggaagggtctggagtgggtctcaagtattgattggcatggtgatgttacatactacgcagactctgtgaagggccggttcaccatctcccgcgacaattccaagaacacgctgtatctgcaaatgaacagcctgcgtgccgaggacaccgcggtatattactgtgcgacagcggaggacgagccggggtatgactactggggtcagggaaccctggtcaccgtctcgagcg

SEQ ID NO: 896 - DNA, 354 bp, Homo sapiens
ggggtgcagctgttggagtctgggggaggcttggtacagcctggggggtccctgcgtctctcctgtgcagcctccggattcatctttgcttggtatgatatggggtgggcccgccaggctccagggaagggtctagagtgggtctcaagtattgattggcatggtaatgttacatactacgcagactccgtgaagggccggttcaccatctcccgcgacaattccaagaacacgctgtatctgcaaatgatcagcctgcgtgccgaggacaccgcggtatattactgtgcgacagcggaggatgagccggggtatgactactggggtcagggaaccctggtcaccgtctcgagc

SEQ ID NO: 897 - DNA, 354 bp, Homo sapiens
ggggtgcagctgttggagtctgggggaggcttggtacagcctggggggtccctgcgtctctcctgtgcagcctccggattcatctttgcttggtatgatatggggtgggcccgccaggctccagggaagggtctagagtgggtctcaagtattgattggcatggtaatgttacatactacgcagactccgtgaagggccggttcatcatctcccgcgacaattccaagaacacgctgtatctgcaaatgaacagcctgcgtgccgaggacaccgcggtatattactgtgcgacagcggaggacgagccggggtatgactactggggtcagggaaccctggtcaccgtctcgagc

SEQ ID NO: 898 - DNA, 354 bp, Homo sapiens
ggggtgcagctgttggagtctgggggaggcttggtacagcctggggggtccctgcgtctctcctgtgcagcctccggattcatctttgcttggtatgatatggggtgggcccgccaggctccagggaagggtctagagtgggtctcaagtattgattggcatggtaatgttatatactacgcagactccgtgaagggccggttcaccatctcccgcgacaattccaagaacacgctgtatctgcaaatgaacagcctgcgtgccgaggacaccgcggtatattactgtgcgacagcggaggacgagccggggtatgactactggggtcagggaaccctggtcaccgtctcgagc

SEQ ID NO: 899 - DNA, 354 bp, Homo sapiens
ggggtgcagctgttggagtccgggggaggcttggtacagcctggggggtccctgcgtctctcctgtgcagcctccggattcatctttgcttggtatgatatggggtgggcccgccaggctccagggaagggtctagagtgggtctcaagtattgattggcatggtaatgctacatactacgcagactccgtgaagggccggttcaccatctcccgcgacaattccaagaacacgctgtatctgcaaatgaacagcctgcgtgccgaggacaccgcggtatattactgtgcgacagcggaggacgagccggggtatgactactggggtcagggaaccctggtcaccgtctcgagc

SEQ ID NO: 900 - DNA, 354 bp, Homo sapiens
ggggtgcagctgttggagtctggggggggcttggtacagcctggggggtccctgcgtctctcctgtgcagcctccggattcatctttgcttggtatgatatggggtgggcccgccaggctccagggaagggtctagagtgggtctcaagtattgattggcatggtaatgttacatactacgcagactccgagaagggccggttcaccatctcccgcgacaattccaagaacacgctgtatctgcaaatgaacagcctgcgtgccgaggacaccgcggtatattactgtgcgacagcggaggacgagccggggtatgactactggggtcagggaaccctggtcaccgtctcgagc

SEQ ID NO: 901 - DNA, 354 bp, Homo sapiens
ggggtgcagctgttggagtctgggggaggcttggtacagcctggggggtccctgcgtctctcctgtgcagcctccggattcatctttgcttggtatgatatggggtgggcccgccaggctccagggaagggtctagagtgggtcacaagtattgattggcatggtaatgttacatactacgcagactctgtgaagggccggttcaccatctcccgcgacaattccaagaacacgctgtatctgcaaatgaacagcctgcgtgccgaggacaccgcggtatattactgtgcgacagcggaggacgagccggggtatgactactggggtcagggaaccctggtcaccgtctcgagc

SEQ ID NO: 902 - DNA, 354 bp, Homo sapiens
ggggtgcagctgttggagtctgggggtggcttggtacagcctggggggtccctgcgtctctcctgtgcagcctccggattcatctttgcttggtatgatatggggtgggcccgccaggctccagggaagggtctagagtgggtctcaagtattgattggcatggtaatgttacatactacgcagactccgtgaagggccggttcaccatctcccgcgacaattccaagaacacgctgtatctgcaaatgaacagcctgcgtgccgaggacaccgcggtatattactgtgcgacagcggaggacgagccggggtatgactactggggtcacggaaccctggtcaccgtctcgagc

SEQ ID NO: 903 - DNA, 354 bp, Homo sapiens
ggggtgcagctgttggagtctgggggaggcttggtacaccctggggggtccctgcgtctctcctgtgcagcctccggattcatctttgcttggtatgatatggggtgggcccgccaggctccagggaagggtctagagtgggtctcaagtattgattggcatggtaatgttacatactacgcagactccgtgaagggccggttcaccatctcccgcgacaattccaagaacacgctgtatctgcaaatgaacagcctgcgtgccgaggacaccgcggtatattactgtgcgacagcggaggacgagccggggtatgactactggggtcagggaaccctggtcaccgtctcgagc

SEQ ID NO: 904 - DNA, 354 bp, Homo sapiens
ggggtgcggctgttggagtctgggggaggcttggtacagcctggggggtccctgcgtctctcctgtgcagcctccggattcatctttgcttggtatgatatggggtgggcccgccaggctccagggaagggtctagagtgggtctcaagtattgattggcatggtaatgttacatactacgcagactccgtgaagggccggttcaccatctcccgcgacaattccaagaacacgctgtatctgcaaatgaacagcctgcgtgccgaggacaccgcggtatattactgtgcgacagcggaggacgagccggggtatgactactggggtcagggaaccctggtcaccgtctcgagc

SEQ ID NO: 905 - DNA, 354 bp, Homo sapiens
ggggtgcagctgttggagtctgggggaggcttggtacagcctggggggtccctgcgtctctcctgtgcagcctccggattcatctttgcttggtatgatatggggtgggcccgccaggctccagggaagggtctagagtgggtctcaagtattgattggcatggtaatgttacatacaacgcagactccgtgaagggccggttcaccatctcccgcgacaattccaagaacacgctgtatctgcaaatgaacagcctgcgtgccgaggacaccgcggtatattactgtgcgacagcggaggacgagccggggtatgactactggggtcagggaaccctggtcaccgtctcgagc

SEQ ID NO: 906 - DNA, 354 bp, Homo sapiens
ggggtgcagctgttggagtctgggggaggcttggtacagcctggggggtccctgcgtctctcctgtgcagcctccggattcatctttgcttggtatgatatggggtgggcccgccaggctccagggaagggtctagagtgggtctcaagtattgattggcatgataatgttacatactacgcagactccgtgaagggccggttcaccatctcccgcgacaattccaagaacacgctgtatctgcaaatgaacagcctgcgtgccgaggacaccgcggtatattactgcgcgacagcggaggacgagccggggtatgactactggggtcagggaaccctggtcaccgtctcgagc

SEQ ID NO: 907 - DNA, 354 bp, Homo sapiens
ggggtgcagctgttggagtctgggggaggcttggtacagcctggggggtccctgcgtctctcctgtgcagcctccggattcatctttgcttggtatgatatggggtgggcccgccaggctccagggaagggtctagagtgggtatcaagtattgattggcatggtaatgtttcatactacgcagactccgtgaagggccggttcaccatctcccgcgacaattccaagaacacgctgtatctgcaaatgaacagcctgcgtgccgaggacaccgcggtatattactgtgcgacagcggaggacgagccggggtatgactactggggtcagggaaccctggtcaccgtctcgagc

SEQ ID NO: 908 - DNA, 354 bp, Homo sapiens
ggggtgcagctgttggagtctgggggaggcttggtacagcctggggggtccctgcgtctctcctgtgcagcctccggattcatctttgcttggtatgatatggggtgggcccgccaggctccagggaagggtctagagtgggtctcaagtattgattggcatggtaatgttacatacttcgcagactccgtgaagggccggttcgccatctcccgcgacaattccaagaacacgctgtatctgcaaatgaacagcctgcgtgccgaggacaccgcggtatattactgtgcgacagcggaggacgagccggggtatgactactggggtcagggaaccctggtcaccgtctcgagc

SEQ ID NO: 909 - DNA, 354 bp, Homo sapiens
ggggtgcagctgttggagtctgggggaggcttggtacagtctggggggtccctgcgtctctcctgtgcagcctccggattcatctttgcttggtatgatatggggtgggcccgccaggctccagggaagggtctagagtgggtctcaagtattgattggcatggtaatgttacatactacgcagactccgtgaagggccggttcaccatctcccgcgacaattccaagaacacgctgtatttgcaaatgaacagcctgcgtgccgaggataccgcggtatattactgtgcgacagcggaggacgagccggggtatgactactggggtcagggaaccctggtcaccgtctcgagc

SEQ ID NO: 910 - DNA, 354 bp, Homo sapiens; identical to SEQ ID NO: 785

SEQ ID NO: 911 - DNA, 354 bp, Homo sapiens
ggggtgcagctgtcggagtctgggggaggcttggtacagcctggggggtccctgcgtctctcctgtgcagcctctggattcatctttgcttggtatgatatggggtgggcccgccaggctccagggaagggtctagagtgggtctcaagtattgattggcatggtaatgttacgtactacgcagactccgtgaagggccggttcaccatctcccgcgacaattccaagaacacgctttatctgcaaatgaacagcctgcgtgccgaggacaccgcggtatattactgtgcgacagcggaggacgagccggggtatgactactggggtcagggaaccctggtcaccgtctcgagc

SEQ ID NO: 912 - DNA, 354 bp, Homo sapiens
ggggtgcagctgttggagtctgggggaggcttggtacagcctggggggtccctgcgtctctcctgtgcagcctccggattcatctttgcttggtatgatatggggtgggcccgccaggctccagggaagggtctagagtgggtctcaagtattgattggcatggtaatgttacatactacgcagactccgtgaagggccggttcaccatctcccgcgacaattccaagaacacgctgtatctgcaaatgaacagcctgcgtgccgaggacaccgcggtatattactgtgcgacagcggaggacgagccggggtatgactactggggtcatggaaccgtggtcaccgtctcgagc

SEQ ID NO: 913 - DNA, 354 bp, Homo sapiens
ggggtgcagctgttggagtctgggggaggcttggtacatcctggggggtccctgcgtctctcctgtgcagcctccggattcatctttgcttggtatgatatggggtgggcccgccaggctccagggaagggtctagagtgggtctcaagtattgattggcatggtaatgttacaaactacgcagactccgtgaagggccggttcaccatctcccgcgacaattccaagaacacgctgtatctgcaaatgaacagcctgcgtgccgaggacaccgcggtatattactgtgcgacagcggaggacgagccggggtatgactactggggtcagggaaccctggtcaccgtctcgagc

SEQ ID NO: 914 - DNA, 354 bp, Homo sapiens
ggggtgcagctgttggattctgggggaggcttggtacagcctggggggtccctgcgtctctcctgtgcagcctccggattcatctttgcttggtatgatatggggtgggcccgccaggctccagggaagggtctagagtgggtctcaagtattgattggcatggtaatgttacatactacgcagactccgtgaagggccggttcaccatctcccgcgacaattccaagaacacgctgtatctgcaaatgaacagcctgcgtgccgaggacaccgcggtatattactgtgcgacagcggaggacgagccggggtatgactactggggtcagggaaccctggtcaccgtctcgagc

SEQ ID NO: 915 - DNA, 354 bp, Homo sapiens
ggggtgcagctgttggagtctgggggaggcttggtacagcctggggggtccctgcgtctatcctgtgcagcctccggattcatctttgcttggtatgatatggggtgggcccgccaggctccagggaagggtctagagtgggtctcaagtattgattggcatggtaatgatacatactacgcagactccgtgaagggccggttcaccatctcccgcgacaattccaagaacacgctgtatctgcaaatgaacagcctgcgtgccgaggacaccgcggtatattactgtgcgacagcggaggatgagccggggtatgactactggggtcagggaaccctggtcaccgtctcgagc

SEQ ID NO: 916 - DNA, 354 bp, Homo sapiens
ggggtgcagctgttggagtctgggggaggcttggtacagcctggggggtccctgcgtctctcctgtgcagcctccggattcatctttgcttggtatgatatggggtgggtccgccaggctccagggaagggtctagagtgggtctcaagtattgatgatcatggtaatgttacatactacgcagactccgtgaagggccggttcaccatctcccgcgacaattccaagaacacgctgtatctgcaaatgaacagcctgcgtgccgaggacaccgcggtatattactgtgcgacagcggaggacgagccggggtatgactactggggtcagggaaccctggtcaccgtctcgagc

SEQ ID NO: 917 - DNA, 354 bp, Homo sapiens
ggggtgcagctgttggagtctgggggaggcttggtacagcctggggggtccctgcgtctctcctgtgcagcctccggattcatctttgcttggtatgatatggggtgggtccgccaggctccagggaagggtctagagtgggtctcaagtattgattggtctggtaatgttacatactacgcagactccgtgaagggccggttcaccatctcccgcgacaattccaagaacacgctgtatctgcaaatgaacagcctgcgtgccgaggacaccgcggtatattactgtgcgacagcggaggacgagccggggtatgactactggggtcagggaaccctggtcaccgtctcgagc

SEQ ID NO: 918 - DNA, 354 bp, Homo sapiens
ggggtgcagctgttggagtctgggggaggcttggtacagcctggggggtccctgcgtctctcctgtgcagcctccggattcatctttgcttggtatgatatggggtgggtccgccaggctccagggaagggtctagagtgggtctcaagtattgattggcatggtacggttacatactacgcagactccgtgaagggccggttcaccatctcccgcgacaattccaagaacacgctgtatctgcaaatgaacagcctgcgtgccgaggacaccgcggtatattactgtgcgacagcggaggacgagccggggtatgactactggggtcagggaaccctggtcaccgtctcgagc

SEQ ID NO: 919 - DNA, 354 bp, Homo sapiens
ggggtgcagctgttggagtctgggggaggcttggtacagcctggggggtccctgcgtctctcctgtgcagcctccggattcatctttgcttggtatgatatggggtgggtccgccaggctccagggaagggtctagagtgggtctcaagtattgattggcatggtaatcagacatactacgcagactccgtgaagggccggttcaccatctcccgcgacaattccaagaacacgctgtatctgcaaatgaacagcctgcgtgccgaggacaccgcggtatattactgtgcgacagcggaggacgagccggggtatgactactggggtcagggaaccctggtcaccgtctcgagc

SEQ ID NO: 920 - DNA, 354 bp, Homo sapiens
ggggtgcagctgttggagtctgggggaggcttggtacagcctggggggtccctgcgtctctcctgtgcagcctccggattcatctttgcttggtatgatatggggtgggtccgccaggctccagggaagggtctagagtgggtctcaaagattactgatcttggttatgctacatactacgcagactccgtgaagggccggttcaccatctcccgcgacaattccaagaacacgctgtatctgcaaatgaacagcctgcgtgccgaggacaccgcggtatattactgtgcgacagcggaggacgagccggggtatgactactggggtcagggaaccctggtcaccgtctcgagc

SEQ ID NO: 921 - DNA, 354 bp, Homo sapiens
ggggtgcagctgttggagtctgggggaggcttggtacagcctggggggtccctgcgtctctcctgtgcagcctccggattcatctttgcttggtatgatatggggtgggcccgccaggctccagggaagggtctagagtgggtctcaagtattgattggcatagtaatgttacatactacgcagactccgtgaagggccggttcaccatctcccgcgacaattccaagaacacgctgtatctgcaaatgaacagcctgcgtgccgaggacaccgcggtatattactgtgcgacagcggaggacgagccggggtatgactactggggtcagggaaccctggtcaccgtctcgagc

SEQ ID NO: 922 - DNA, 354 bp, Homo sapiens
ggggtgcagctgttggagtctgggggaggcttggtacagcctggggggtccctgcgtctctcctgtgcagcctccggattcatctttgcttggtatgatatggggtgggcccgccaggctccagggaagggtctagagtgggtctcacatattgattggcatggtaatgttacatactacgcagactccgtgaagggccggttcaccatctcccgcgacaattccaagaacacgctgtatctgcaaatgaacagcctgcgtgccgaggacaccgcggtatattactgtgcgacagcggaggacgagccggggtatgactactggggtcagggaaccctggtcaccgtctcgagc

SEQ ID NO: 923 - DNA, 354 bp, Homo sapiens
ggggtgcagctgttggagtctgggggaggcttggtacagcctggggggtccctgcgtctctcctgtgcagcctccggattcatctttgcttggtatgatatggggtgggctcgccaggctccagggaagggtctagagtgggtctcaactattaatgatcatggtaatgttacatactacgcagactccgtgaagggccggttcaccatctcccgcgacaattccaagaacacgctgtatctgcaaatgaacagcctgcgtgccgaggacaccgcggtatattactgtgcgacagcggaggacgagccggggtatgactactggggtcagggaaccctggtcaccgtctcgagc

SEQ ID NO: 924 - DNA, 354 bp, Homo sapiens
ggggtgcagctgttggagtctgggggaggcttggtacagcctggggggtccctgcgtctctcctgtgcagcctccggattcatctttgcttggtatgatatggggtgggcccgccaggctccagggaagggtcttgagtgggtctcaagtattgattggcgtggttctgttacatactacgcagactccgtgaagggccggttcaccatctcccgcgacaattccaagaacacgctgtatctgcaaatgaacagcctgcgtgccgaggacaccgcggtatattactgtgcgacagcggaggacgagccggggtatgactactggggtcagggaaccctggtcaccgtctcgagc

SEQ ID NO: 925 - DNA, 354 bp, Homo sapiens
ggggtgcagctgttggagtctgggggaggcttggtacagcctggggggtccctgcgtctctcctgtgcagcctccggattcatctttgcttggtatgatatggggtgggcccgccaggctccagggaagggtctagagtgggtctcaagtattgattggtatggtttggttacatactacgcagactccgtgaagggccggttcaccatctcccgcgacaattccaagaacacgctgtatctgcaaatgaacagcctgcgtgccgaggacaccgcggtatattactgtgcgacagcggaggacgagccggggtatgactactggggtcagggaaccctggtcaccgtctcgagc

SEQ ID NO: 926 - DNA, 354 bp, Homo sapiens
ggggtgcagctgttggagtctgggggaggcttggtacagcctggggggtccctgcgtctctcctgtgcagcctccggattcatctttgcttggtatgatatggggtgggcccgccaggctccagggaagggtctagagtgggtctcaagtattgattggcatggttttgttacatactacgcagactccgtgaagggccggttcaccatctcccgcgacaattccaagaacacgctgtatctgcaaatgaacagcctgcgtgccgaggacaccgcggtatattactgtgcgacagcggaggacgagccggggtatgactactggggtcagggaaccctggtcaccgtctcgagc

SEQ ID NO: 927 - DNA, 354 bp, Homo sapiens
ggggtgcagctgttggagtctgggggaggcttggtacagcctggggggtccctgcgtctctcctgtgcagcctccggattcatctttgcttggtatgatatggggtgggcccgccaggctccagggaagggtctagagtgggtctcaagtattgatgagcctggtcgtgttacatactacgcagactccgtgaagggccggttcaccatctcccgcgacaattccaagaacacgctgtatctgcaaatgaacagcctgcgtgccgaggacaccgcggtatattactgtgcgacagcggaggacgagccggggtatgactactggggtcagggaaccctggtcaccgtctcgagc

SEQ ID NO: 928 - DNA, 354 bp, Homo sapiens
ggggtgcagctgttggagtctgggggaggcttggtacagcctggggggtccctgcgtctctcctgtgcagcctccggattcatctttgcttggtatgatatggggtgggtccgccaggctccagggaagggtctagagtgggtctcaagtattgattggtggggtgaggttacatactacgcagactccgtgaagggccggttcaccatctcccgcgacaattccaagaacacgctgtatctgcaaatgaacagcctgcgtgccgaggacaccgcggtatattactgtgcgacagcggaggacgagccggggtatgactactggggtcagggaaccctggtcaccgtctcgagc

SEQ ID NO: 929 - DNA, 354 bp, Homo sapiens
ggggtgcagctgttggagtctgggggaggcttggtacagcctggggggtccctgcgtctctcctgtgcagcctccggattcatctttgcttggtatgatatggggtgggtccgccaggctccagggaagggtctagagtgggtctcaagtattgattggaggggtattgttacatactacccagactccgtgaagggccggttcaccatctcccgcgacaattccaagaacacgctgtatctgcaaatgaacagcctgcgtgccgaggacaccgcggtatattactgtgcgacagcggaggacgagccggggtatgactactggggtcagggaaccctggtcaccgtctcgagc

SEQ ID NO: 930 - DNA, 354 bp, Homo sapiens
ggggtgcagctgttggagtctgggggaggcttggtacagcctggggggtccctgcgtctctcctgtgcagcctccggattcatctttgcttggtatgatatggggtgggtccgccaggctccagggaagggtctagagtgggtctcaagtattgattggcggggtttgttgacatactacgcagactccgtgaagggccggttcaccatctcccgcgacaattccaagaacacgctgtatctgcaaatgaacagcctgcgtgccgaggacaccgcggtatattactgtgcgacagcggaggacgagccggggtatgactactggggtcagggaaccctggtcatcgtctcgagc

SEQ ID NO: 931 - DNA, 354 bp, Homo sapiens
ggggtgcagctgttggagtctgggggaggcttggtactgcctggggggtccctgcgtctctcctgtgcagcctccggattcatctttgcttggtatgatatggggtgggcccgccaggctccagggaagggtctagagtgggtctcaagtattgattggcggggtggtctgacatactacgcagactccgtgaagggccggttcaccatctcccgcgacaattccaagaacacgctgtatctgcaaatgaacagcctgcgtgccgaggacaccgcggtatattactgtgcgacagcggaggacgagccggggtatgactactggggtcagggaaccctggtcaccgtctcgagc

SEQ ID NO: 932 - DNA, 354 bp, Homo sapiens
ggggtgcagctgttggagtctgggggaggcttggtacagcctggggggtccctgcgtctctcctgtgcagcctccggattcatctttgcttggtatgatatggggtgggcccgccaggctccagggaagggtctagagtgggtctcaagtattgattggaggggtaaggctacatactacgcagactccgtgaagggccggttcaccatctcccgcgacaattccaagaacacgctgtatctgcaaatgaacagcctgcgtgccgaggacaccgcggtatattactgtgcgacagcggaggacgagccggggtatgactactggggtcagggaaccctggtcaccgtctcgagc

SEQ ID NO: 933 - DNA, 354 bp, Homo sapiens
ggggtgcagctgttggagtctgggggaggcttggtacagcctggggggtccctgcgtctctcctgtgcagcctccggattcatctttgcttggtatgatatggggtgggcccgccaggctccagggaagggtctagagtgggtctcaagtattgattggaggggtttgtctacatactacgcagactccgtgaagggccggttcaccatctcccgcgacaattccaagaacacgctgtatctgcaaatgaacagcctgcgtgccgaggacaccgcggtatattactgtgcgacagcggaggacgagccggggtatgactactggggtcagggaaccctggtcaccgtctcgagc

SEQ ID NO: 934 - DNA, 354 bp, Homo sapiens
ggggtgcagctgttggagtctgggggaggcttggtacagcctggggggtccctgcgtctctcctgtgcagcctccggattcatctttgcttggtatgatatggggtgggtccgccaggctccagggaagggtctagagtgggtctcaagtattgattggcatggtaagattacatactacgcagactccgtgaagggccggttcaccatctcccgcgacaattccaagaacacgctgtatctgcaaatgaacagcctgcgtgccgaggacaccgcggtatattactgtgcgacagcggaggacgagccggggtatgactactggggtcagggaaccctggtcaccgtctcgagc

SEQ ID NO: 935 - DNA, 354 bp, Homo sapiens
ggggtgcagctgttggagtctgggggaggcttggtacagcctggggggtccctgcgtctctcctgtgcagcctccggattcatctttgcttggtatgatatggggtgggcccgccaggctccagggaagggtctagagtgggtctcaagtattgattggaggggtggtacgacatactacgcagactccgtgaagggccggttcaccatctcccgcgacaattccaagaacacgctgtatctgcaaatgaacagcctgcgtgccgaggacaccgcggtatattactgtgcgacagcggaggacgagccggggtatgactactggggtcagggaaccctggtcaccgtctcgaac

SEQ ID NO: 936 - DNA, 354 bp, Homo sapiens
ggggtgcagctgttggagtctgggggaggcttggtacagcctggggggtccctgcgtctctcctgtgcagcctccggattcatctttgcttggtatgatatggggtgggcccgccaggctccagggaagggtctggagtgggtctcaagtattgattggcatggtattgagacatactacgcagactccgtgaagggccggttcaccatctcccgcgacaattccaagaacacgctgtatctgcaaatgaacagcctgcgtgccgaggacaccgcggtatattactgtgcgacagcggaggacgagccggggtatgactactggggtcagggaaccctggtcaccgtctcgagc

SEQ ID NO: 937 - DNA, 354 bp, Homo sapiens
ggggtgcagctgttggagtctgggggaggcttggtacagcctggggggtccctgcgtctctcctgtgcagcctccggattcatctttgcttggtatgatatggggtgggcccgccaggctccaggtaagggtctagagtgggtctcaagtattgattggcatggttcgattacatactacgcagactccgtgaagggccggttcaccatctcccgcgacaattccaagaacacgctgtatctgcaaatgaacagcctgcgtgccgaggacaccgcggtatattactgtgcgacagcggaggacgagccggggtatgactactggggtcagggaaccctggtcaccgtctcgagc

SEQ ID NO: 938 - DNA, 354 bp, Homo sapiens
ggggtgcagctgttggagtctgggggaggcttggtacagcctggggggtccctgcgtctctcctgtgcagcctccggattcatctttgcttggtatgatatggggtgggtccgccaggctccagggaagggtctagagtgggtctcaagtattgattggtatggtactggtacatactacgcagactccgtgaagggccggttcaccatctcccgcgacaattccaagaacacgctgtatctgcaaatgaacagcctgcgtgccgaggacaccgcggtatattactgtgcgacagcggaggacgagccggggtatgactactggggtcagggaaccctggtcaccgtctcgagc

SEQ ID NO: 939 - DNA, 354 bp, Homo sapiens
ggggtgcagctgttggagtctgggggaggcttggtacagcctggggggtccctgcgtctctcctgtgcagcctccggattcatctttgcttggtatgatatggggtgggcccgccaggctccagggaagggtctagagtgggtctcaagtattgattggcggggtacgctgacatactacgcagactccgtgaagggccggttcaccatctcccgcgacaattccaagaacacgctgtatctgcaaatgaacagcctgcgtgccgaggacaccgcggtatattactgtgcgacagcggaggacgagccggggtatgactactggggtcagggaaccctggtcaccgtctcgagc

SEQ ID NO: 940 - DNA, 354 bp, Homo sapiens
ggggtgcagctgttggagtctgggggaggcttggtacagcctggggggtccctgcgtctctcctgtgcagcctccggattcatctttgcttggtatgatatggggtgggcccgccaggctccagggaagggtctagagtgggtctcaagtattgattggcggggtcttattacatactacgcagactccgtgaagggccggttcaccatctcccgcgacaattccaagaacacgctgtatctgcaaatgaacagcctgcgtgccgaggacaccgcggtatattactgtgcgacagcggaggacgagccggggtatgactactggggtcagggaaccctggtcaccgtctcgagc

SEQ ID NO: 941 - DNA, 354 bp, Homo sapiens
ggggtgcagctgttggagtctgggggaggcttggtacagcctggggggtccctgcgtctctcctgtgcagcctccggattcatctttgcttggtatgatatggggtgggtccgccaggctccagggaagggtcttgagtgggtctcaagtattgattggcttggtaagttgacatactacgcagactccgtgaagggccggttcaccatctcccgcgacaattccaagaacacgctgtatctgcaaatgaacagcctgcgtgccgaggacaccgcggtatattactgtgcgacagcggaggacgagccggggtatgactactggggtcagggaaccctggtcaccgtctcgagc

SEQ ID NO: 942 - DNA, 354 bp, Homo sapiens
ggggtgcagctgttggagtctgggggaggcttggtacagcctggggggtccctgcgtctctcctgtgcagcctccggattcatctttgcttggtatgatatggggtgggtccgccaggctccagggaagggtctagagtgggtctcaagtattgattggtatggtaatgttacatactacgcagactccgtgaagggccggttcaccatctcccgcgacaattccaagaacacgctgtatctgcaaatgaacagcctgcgtgccgaggacaccgcggtatattactgtgcgacagcggaggacgagccggggtatgactactggggtcagggaaccctggtcaccgtctcgagc

SEQ ID NO: 943 - DNA, 354 bp, Homo sapiens
ggggtgcagctgttggagtctgggggaggcttggtacagcctggagggtccctgcgtctctcctgtgcagcctccggattcatctttgcttggtatgatatggggtgggcccgccaggctccagggaagggtctagagtgggtctcaagtattaattggttgggtaatgttacatactacgcagactccgtgaagggccggttcaccatctcccgcgacaattccaagaacacgctgtatctgcaaatgaacagcctgcgtgccgaggacaccgcggtatattactgtgcgacagcggaggacgagccggggtatgactactggggtcagggaaccctggtcaccgtctcgagc

SEQ ID NO: 944 - DNA, 354 bp, Homo sapiens
ggggtgcagctgttggagtctgggggaggcttggtacagcctggggggtccctgcgtctctcctgtgcagcctccggattcatctttgcttggtatgatatggggtgggcccgccaggctccagggaagggtctagagtgggtctcaagtattgggtggcatggtaatgttacatactacgcagactccgtgaagggccggttcaccatctcccgcgacaattccaagaacacgctgtatctgcaaatgaacagcctgcgtgccgaggacaccgcggtatattactgtgcgacagcggaggacgagccggggtatgactactggggtcagggaaccctggtcaccgtctcgagc

SEQ ID NO: 945 - DNA, 354 bp, Homo sapiens
ggggtgcagctgttggagtctgggggaggcttggtacagcctggggggtccctgcgtctctcctgtgcagcctccggattcatctttgcttggtatgatatggggtgggcccgccaggcaccagggaagggtctagagtgggtctcaagtattgattgggtgggtaatgttacatactacgcagactccgtgaagggccggttcaccatctcccgcgacaattccaagaacacgctgtatctgcaaatgaacagcctgcgtgccgaggacaccgcggtatattactgtgcgacagcggaggacgagccggggtatgactactggggtcagggaaccctggtcaccgtctcgagc

SEQ ID NO: 946 - DNA, 354 bp, Homo sapiens
ggggtgcagctgttggagtctgggggaggcttggtacagcctggggggtccctgcgtctctcctgtgcagcctccggattcatctttgcttggtatgatatggggtgggtccgccaggctccagggaagggtctagagtgggtctcaagtattaatgatggtggtaatgttacatactacgcagactccgtgaagggccggttcaccatctcccgcgacaattccaagaacacgctgtatctgcaaatgaacagcctgcgtgccgaggacaccgcggtatattactgtgcgacagcggaggacgagccggggtatgactactggggtcagggaaccctggtcaccgtctcgagc

SEQ ID NO: 947 - DNA, 355 bp, Homo sapiens
  misc_feature 318, 354: n = A,T,C or G
ggggtgcagctgttggagtctgggggaggcttggtacagcctggggggtccctgcgtctctcctgtgcagcctccggattcatctttgcttggtatgatatggggtgggcccgccaggctccagggaagggtctagagtgggtctcaagtattgattggcatggtaatgttacatactacgcagactccgtgaagggccggttcaccatctcccgcgacaattccaagaacacgctgtatctgcaaatgaacagcctgcgtgccgaggacaccgcggtatattactgtgcgacagcggagcccttcttctcgtatganctactggggtcagggaagccctggtcaccgttctcnt

SEQ ID NO: 948 - DNA, 354 bp, Homo sapiens
ggggtgcagctgttggagtctgggggaggcttggtacagcctggggggtccctgcgtctctcctgtgcagcctccggattcatctttgcttggtatgatatggggtgggcccgccaggctccagggaagggtctagagtgggtctcaagtattgattggaggggtgatcagacatactacgcagactccgtgaagggccggttcaccatctcccgcgacaattccaagaacacgctgtatctgcaaatgaacagcctgcgtgccgaggacaccgcggtatattactgtgcgacagcggaggacgagccggggtatgactactggggtcagggaaccctggtcaccgtctcgagc

SEQ ID NO: 949 - DNA, 354 bp, Homo sapiens
ggggtgcagctgttggagtctgggggaggcttggtacagcctggggggtccctgcgtctctcctgtgcagcctccggattcatctttgcttggtatgatatggggtgggcccgccaggctccagggaagggtctagagtgggtctcaagtattgattggcagggtaatactacatactacgcagactccgtgaagggccggttcaccatctcccgcgacaattccaagaacacgctgtatctgcaaatgaacagcctgcgtgccgaggacaccgcggtatattactgtgcgacagcggaggacgagccggggtatgactactggggtcagggaaccctggtcaccgtctcgagc

SEQ ID NO: 950 - DNA, 354 bp, Homo sapiens
ggggtgcagctgttggagtctgggggaggcttggtacagcctggggggtccctgcgtctctcctgtgcagcctccggattcatctttgcttggtatgatatggggtgggtccgccaggctccagggaagggtctagagtgggtctcaagtattgattggacgggtaatgttacatactacgcagactccgtgaagggccggttcaccatctcccgcgacaattccaagaacacgctgtatctgcaaatgaacagcctgcgtgccgaggacaccgcggtatattactgtgcgacagcggaggacgagccggggtatgactactggggtcagggaaccctggtcaccgtctcgagc

SEQ ID NO: 951 - DNA, 354 bp, Homo sapiens
ggggtgcagctgttggagtctgggggaggcttggtacagcctggggggtccctgcgtctctcctgtgcagcctccggattcatctttgcttggtatgatatggggtgggcccgccaggctccagggaagggtctagagtgggtctcaagtattagtgatcgtggtaatgttacatactacgcagactccgtgaagggccggttcaccatctcccgcgacaattccaagaacacgctgtatctgcaaatgaacagcctgcgtgccgaggacaccgcggtatattactgtgcgacagcggaggacgagccggggtatgactactggggtcagggaaccctggtcaccgtctcgagc

SEQ ID NO: 952 - DNA, 354 bp, Homo sapiens
ggggtgcagctgttggagtctgggggaggcttggtacagcctggggggtccctgcgtctctcctgtgcagcctccggattcatctttgcttggtatgatatggggtgggcccgccaggctccagggaagggtctagagtgggtctcaagtattaatgattggggtaatgttacatactacgcagactccgtgaagggccggttcaccatctcccgcgacaattccaagaacacgctgtatctgcaaatgaacagcctgcgtgccgaggacaccgcggtatattactgtgcgacagcggaggacgagccggggtatgactactggggtcagggaaccctggtcaccgtctcgagc

SEQ ID NO: 953 - DNA, 354 bp, Homo sapiens
ggggtgcagctgttggagtctgggggaggcttggtacagcctggggggtccctgcgtctctcctgtgcagcctccggattcatctttgcttggtatgatatggggtgggtccgccaggctccagggaagggtctagagtgggtctcaagtattaatgatcgtggtaatgttacatactacgcagactccgtgaagggccggttcaccatctcccgcgacaattccaagaacacgctgtatctgcaaatgaacagcctgcgtgccgaggacaccgcggtatattactgtgcgacagcggaggacgagccggggtatgactactggggtcagggaaccctggtcaccgtctcgagc

SEQ ID NO: 954 - DNA, 354 bp, Homo sapiens
ggggtgcagctgttggagtctgggggaggcttggtacagcctggggggtccctgcgtctctcctgtgcagcctccggattcatctttgcttggtatgatatggggtgggcccgccaggctccagggaagggtctagagtgggtctcaagtattgattggaagggtggtaagacatactacgcagactccgtgaagggccggttcaccatctcccgcgacaattccaagaacacgctgtatctgcaaatgaacagcctgcgtgccgaggacaccgcggtatattactgtgcgacagcggaggacgagccggggtatgactactggggtcagggaaccctggtcaccgtctcgagc

SEQ ID NO: 955 - DNA, 354 bp, Homo sapiens
ggggtgcagctgttggagtctgggggaggcttggtacagcctggggggtccctgcgtctctcctgtgcagcctccggattcatctttgcttggtatgatatggggtgggcccgccaggctccagggaagggtctagagtgggtctcatctattaattggcatggtaatgttacatactacgcagactccgtgaagggccggttcaccatctcccgcgacaattccaagaacacgctgtatctgcaaatgaacagcctgcgtgccgaggacaccgcggtatattactgtgcgacagcggaggacgagccggggtatgactactggggtcagggaaccctggtcaccgtctcgagc

SEQ ID NO: 956 - DNA, 354 bp, Homo sapiens
ggggtgcagctgttggagtctgggggaggcttggtacagcctggggggtccctgcgtctctcctgtgcagcctccggattcatctttgcttggtatgatatggggtgggcccgccaggctccagggaagggtcttgagtgggtctcagttattaattggcatggtaatgttacatactacgcagactccgtgaagggccggttcaccatctcccgcgacaattccaagaacacgctgtatctgcaaatgaacagcctgcgtgccgaggacaccgcggtatattactgtgcgacagcggaggacgagccggggtatgactactggggtcagggaaccctggtcaccgtctcgagc

SEQ ID NO: 957 - DNA, 354 bp, Homo sapiens
ggggtgcagctgttggagtctgggggaggcttggtacagcctggggggtccctgcgtctctcctgtgcagcctccggattcatctttgcttggtatgatatggggtgggtccgcctggctccagggaagggtctagagtgggtctcaatgattaattggcatggtaatgttacatactacgcagactccgtgaagggccggttcaccatctcccgcgacaattccaagaacacgctgtatctgcaaatgaacagcctgcgtgccgaggacaccgcggtatattactgtgcgacagcggaggacgagccggggtatgactactggggtcagggaaccctggtcaccgtctcgagc

SEQ ID NO: 958 - DNA, 354 bp, Homo sapiens
ggggtgcagctgttggagtctgggggaggcttggtacagcctggggggtccctgcgtctctcctgtgcagcctccggattcatctttgcttggtatgatatggggtgggtccgccaggctccagggaagggtctagagtgggtctcaaagattaattggcatggtaatgttacatactacgcagactccgtgaagggccggttcaccgtctcccgcgacaattccaagaacacgctgtatctgcaaatgaacagcctgcgtgccgaggacaccgcggtatattactgtgcgacagcggaggacgagccggggtatgactactggggtcagggaaccctggtcaccgtctcgagc

SEQ ID NO: 959 - DNA, 354 bp, Homo sapiens
ggggtgcagctgttggagtctgggggaggcttggtacagcctggggggtccctgcgtctctcctgtgcagcctccggattcatctttgcttggtatgatatggggtgggtccgccaggctccagggaagcgtctagagtgggtctcagttattaattggcatggtaatgttacatactacgcagactccgtgaagggccggttcaccatctcccgcgacaattccaagaacacgctgtatctgcaaatgaacagcctgcgtgccgaggacaccgcggtatattactgtgcgacagcggaggacgagccggggtatgactactggggtcagggaaccctggtcaccgtctcgagc

SEQ ID NO: 960 - DNA, 354 bp, Homo sapiens
ggggtgcagctgttggagtctgggggaggcttggtacagcctggggggtccctgcgtctctcctgtgcagcctccggattcatctttgcttggtatgatatggggtgggtccgccaggctccagggaagggtctagagtgggtctcatcgattagttatcatggtaatgttacatactacgcagactccgtgaagggccggttcaccatctcccgcgacaattccaagaacacgctgtatctgcaaatgaacagcctgcgtgccgaggacaccgcggtatattactgtgcgacagcggaggacgagccggggtatgactactggggtcagggaaccctggtcaccgtctcgagc

SEQ ID NO: 961 - DNA, 354 bp, Homo sapiens
ggggtgcagctgttggagtctgggggaggcttggtacagcctgggggatccctgcgtctctcctgtgcagcctccggattcatctttgcttggtatgatatggggtgggcccgccaggctccagggaagggtctagagtgggtctcacatattgagagtcatggtaatgttacatactacgcagactccgtgaagggccggttcaccatctcccgcgacaattccaagaacacgctgtatctgcaaatgaacagcctgcgtgccgaggacaccgcggtatattactgtgcgacagcggaggacgagccggggtatgactactggggtcagggaaccctggtcaccgtctcgagc

SEQ ID NO: 962 - DNA, 354 bp, Homo sapiens
ggggtgcagctgttggagtctgggggaggcttggtacagcctggggggtccctgcgtctctcctgtgcagcctccggattcatctttgcttggtatgatatggggtgggcccgccaggctccagggaagggtctagagtgggtctcaaggattacgcatcatggtaatgttacatactacgcagactccgtgaagggccggttcaccatctcccgcgacaattccaagaacacgctgtatctgcaaatgaacagcctgcgtgccgaggacaccgcggtatattactgtgcgacagcggaggacgagccggggtatgactactggggtcagggaaccctggtcaccgtctcgagc

SEQ ID NO: 963 - DNA, 354 bp, Homo sapiens
ggggtgcagctgttggagtctgggggaggctcggtacagcctggggggtccctgcgtctctcctgtgcagcctccggattcatctttgcttggtatgatatggggtgggtccgccaggctccagggaagggtctagagtgggtctcaaagattgctgatcatggtaatgttacatactacgcagactccgtgaagggccggttcaccatctcccgcgacaattccaagaacacgctgtatctgcaaatgaacagcctgcgtgccgaggacaccgcggtatattactgtgcgacagcggaggacgagccggggtatgactactggggtcagggaaccctggtcaccgtctcgagc

SEQ ID NO: 964 - DNA, 354 bp, Homo sapiens
ggggtgcagctgttggagtctgggggaggcttggtacagcctggggggtccctgcgtctctcctgtgcagcctccggattcatctttgcttggtatgatatggggtgggtccgccaggctccagggaagggtctagagtgggtctcaaggattggtgctcatggtaatgttacatactacgcagactccgtgaagggccggttcaccatctcccgcgacaattccaagaacacgctgtatctgcaaatgaacagcctgcgtgccgaggacaccgcggtatattactgtgcgacagcggaggacgagccggggtatgactactggggtcagggaaccctggtcaccgtctcgagc

SEQ ID NO: 965 - DNA, 354 bp, Homo sapiens
ggggtgcagctgttggagtctgggggaggcttggtacagcctggggggtccctgcgtctctcctgtgcagcctccggattcatctttgcttggtatgatatggggtgggcccgccaggctccagggaagggtctagagtgggtctcacagattagttggcatggtaatgttacatactacgcagactccgtgaagggccggttcaccatctcccgcgacaattccaagaacacgctgtatctgcaaatgaacagcctgcgtgccgaggacaccgcggtatattactgtgcgacagcggaggacgagccggggtatgactactggggtcagggaaccctggtcaccgtctcgagc

SEQ ID NO: 966 - DNA, 354 bp, Homo sapiens
ggggtgcagttgttggagtccgggggaggcttggtacagcctggggggtccctgcgtctctcctgtgcagcctccggattcatctttgcttggtatgatatggggtgggtccgccaggctccagggaagggtctagagtgggtctcaactattaattggcatggtaatgttacatactacgcagactccgtgaagggccggttcaccatctcccgcgacaattccaagaacacgctgtatctgcaaatgaacagcctgcgtgccgaggacaccgcggtatattactgtgcgacagcggaggacgagccggggtatgactactggggtcagggaaccctggtcaccgtctcgagc

SEQ ID NO: 967 - protein, 118 aa, Homo sapiens
GVQLLESGGGLVQPGGSLRLSCAASGFTFAWYDMGWARQAPGKGLEWVSSIDDSGTQTYYADSVKGRFTISRDNSKNTLYLQMNSLRAEDTAVYYCATAERDDTFDYWGQGTLVTVSS

SEQ ID NO: 968 - protein, 118 aa, Homo sapiens
GVQLLESGGGLVQPGGSLRLSCAASGFTFAWYDMGWARQAPGKGLEWVSSIDDSGTQTYYADSVKGRFTISRDNSKKTLYLQMNSLRAEDTAVYYCATAERDDTFDYWGQGTLVTVSS

SEQ ID NO: 969 - protein, 118 aa, Homo sapiens
GVQLLESGGGLVQPGGSLRLSCAASGFTFAWYDMGWARQAPEKGLEWVSSINDYGTQTYYADSVKGRFTISRDNSNNTLYLQMNSLRAEDTAVYYCATAERDDTFDYWGQGTLVTVSS

SEQ ID NO: 970 - protein, 118 aa, Homo sapiens
GVQLLESGGGLVQPGGSLRLSCAASGFTFAWYDMGWARQAPGKGLEWVSSIDDSGTQTYYADSVKGRFTISRDNSKNTLYLQMNSLRAEDTAVYYCATAERDDTYDYWGQGTLVTVSS

SEQ ID NO: 971 - protein, 118 aa, Homo sapiens
GVQLLESGGGLVQPGGSLRLSCAASGFTFAWYDMGWARQAPGKGLEWVSSIDDSGTHTYYADSVNGRFTISRDNSKNTLYLQMNSLRAEDTAVYYCATAERDDTFDYWGQGTLVTVSS

SEQ ID NO: 972 - protein, 118 aa, Homo sapiens
GVQLLESGGGLVQPGGSLRLSCAASGFTFAWYDMGWARQAPGKGLEWVSSIDDSGTQTYYADSVMGRFTISRDNSKNTLYLQMNSLRAEDTAVYYCATAERDDTFDYWGQGTLVTVSS

SEQ ID NO: 973 - protein, 118 aa, Homo sapiens
GVKLLESGGGLVQPGGSLRLSCAASGFTFAWYDMGWARQAPGKGLEWVSSIDDSGTQTYYADSVKGRFTISRDNSKNTLYLQMNSLRAEDTAVYYCATAERDDTFDYWGQGTLVTVSS

SEQ ID NO: 974 - protein, 118 aa, Homo sapiens
GAQLLESGGGLVQPGGSLRLSCAASGFTFAWYDMGWARQAPGKGLEWVSSIDDSGTQTYYADSVKGRFTISRDNSKNTLYLQMNSLRAEDTAVYYCATAERDDTFDYWGQGTLVTVSS

SEQ ID NO: 975 - protein, 118 aa, Homo sapiens
GVQLLESGGGLVQPGGSLRLSCAASGFTFAWYDMGWARQAPGKGLEWVSKIKDYGLATYYADSVKGRFTISRDNSKNTLYLQMNSLRAEDTAVYYCATAERDDTFDYWGQGTLVTVSS

SEQ ID NO: 976 - protein, 118 aa, Homo sapiens
GVQLLESGGGLVQPGGSLRLSCAASGFTFAWYDMGWARQAPGKGLEWVSTIAWLGDGTYYADSVKGRFTISRDNSKNTLYLQMNSLRAEDTAVYYCATAERDDTFDYWGQGTLVTVSS

SEQ ID NO: 977 - protein, 118 aa, Homo sapiens
GVQLLESGGGLVQPGGSLRLSCAASGFTFAWYDMGWVRQAPGKGLEWVSTIDWVGLATYYADSVKGRFTISRDNSKNTLYLQMNSLRAEDTAVYYCATAERDDTFDYWGQGTLVTVSS

SEQ ID NO: 978 - protein, 118 aa, Homo sapiens
GVQLLESGGGLVQPGGSLRLSCAASGFTFAWYDMGWARQAPGKGLEWVSVIPWVGPLTYYADSVKGRFTISRDNSKNTLYLQMNSLRAEDTAVYYCATAERDDTFDYWGQGTLVTVSS

SEQ ID NO: 979 - protein, 118 aa, Homo sapiens
GVQLLESGGGLVQPGGSLRLSCAASGFTFAWYDMGWARQAPGKGLEWVSTITDWGLSTYYADSVKGRFTISRDNSKNTLYLQMNSLRAEDTAVYYCATAERDDTFDYWGQGTLVTVSS

SEQ ID NO: 980 - protein, 118 aa, Homo sapiens
GVQLLESGGGLVQPGGSLRLSCAASGFTFAWYDMGWVRQAPGKGLEWVSEINWYGVVTYYADSVKGRFTISRDNSKNTLYLQMNSLRAEDTAVYYCATAERDDTFDYWGQGTLVTVSS

SEQ ID NO: 981 - protein, 118 aa, Homo sapiens
GVQLLESGGGLVQPGGSLRLSCAASGFTFAWYDMGWARQAPGKGLEWVSIITDSGWGTYYADSVKGRFTISRDNSKNTLYLQMNSLRAEDTAVYYCATAERDDTFDYWGQGTLVTVSS

SEQ ID NO: 982 - protein, 118 aa, Homo sapiens
GVQLLESGGGLVQPGGSLRLSCAASGFTFAWYDMGWARQAPGKGLEWVSRIKDWGWATYYADSVKGRFTISRDNSKNTLYLQMNSLRAEDTAVYYCATAERDDTFDYWGQGTLVTVLE

SEQ ID NO: 983 - protein, 118 aa, Homo sapiens
GVQLLESGGGLVQPGGSLRLSCAASGFTFAWYDMGWARQAPGKGLEWVSLISDLGYATYYADSVKGRFTISRDNSKNTLYLQMNSLRAEDTAVYYCATAERDDTFDYWGQGTLVTVSS

SEQ ID NO: 984 - protein, 118 aa, Homo sapiens
GVQLLESGGGLVQPGGSLRLSCAASGFTFAWYDMGWARQAPGKGLEWVSRINDIGYATYYADSVKGRFTISRDNSKNTLYLQMNSLRAEDTAVYYCATAERDDTFDYWGQGTLVTVSS

SEQ ID NO: 985 - protein, 118 aa, Homo sapiens
GVQLLESGGGLVQPGGSLRLSCAASGFTFAWYDMGWARQAPGKGLEWVSKITWLGNITYYADSVKGRFTISRDNSKNTLYLQMNSLRAEDTAVYYCATAERDDTFDYWGQGTLVTVSS

SEQ ID NO: 986 - protein, 118 aa, Homo sapiens
GVQLLESGGGLVQPGGSLRLSCAASGFTFAWYDMGWARQAPGKGLEWVSVIKWVGGSTYYADSVKGRFTISRDNSKNTLYLQMNSLRAEDTAVYYCATAERDDTFDYWGQGTLVTVSS

SEQ ID NO: 987 - protein, 118 aa, Homo sapiens
  VARIANT 28, 36, 55, 89, 110: Xaa = Any Amino Acid
WVQLLESGGGLVQPGGSLRLSCAASGFXFAWYYMGXARQAPGKGLEWVSVIRDDXRGTYYADSVKGRFTISRDNSKNTLNLQMNSLRAXDTAVYYCATAERDDTFDYWGXGTLVTVSS

SEQ ID NO: 988 - protein, 118 aa, Homo sapiens
GVQLLESGGGLVQPGGSLRLSCAASGFTFAWYDMGWVRQAPGKGLEWVSVIPWIGPPTYYADSVKGRFTISRDNSKNTLYLQMNSLRAEDTAVYYCATAERDDTFDYWGQGTLVTVSS

SEQ ID NO: 989 - protein, 118 aa, Homo sapiens
GVQLLESGGGLVQPGGSLRLSCAASGFTFAWYDMGWARQAPGKGLEWVSRITDWGYATYYADSVKGRFTISRDNSKNTLYLQMNSLRAEDTAVYYCATAERDDTFDYWGQGTLVTVSS

SEQ ID NO: 990 - protein, 118 aa, Homo sapiens
GVQLLESGGGLVQPGGSLRLSCAASGFTFAWYDMGWARQAPGKGLEWVSEIWDNGRFTYYADSVKGRFTISRDNSKNTLYLQMNSLRAEDTAVYYCATAERDDTFDYWGQGTLVTVSS

SEQ ID NO: 991 - protein, 118 aa, Homo sapiens
GVQLLESGGGLVQPGGSLRLSCAASGFTFAWYDMGWARQAPGKGLEWVSSIDDSGTQTYYADSVKGRFTISRDNSKNTLYLEMNSLRAEDTAVYYCATAERDDTYDYWGQGTLVTVSS

SEQ ID NO: 992 - protein, 118 aa, Homo sapiens
GVQLLESGGGLVQPGGSLRLSCAASGFTFAWYDMGWARQAPGKGLEWVTSIDDSGTQTYYADSVKGRFTISRDNSKNTLYLQMNSLRAEDTAVYYCATAERDDTYDYWGQGTLVTVSS

SEQ ID NO: 993 - protein, 118 aa, Homo sapiens
GVQLLESGGGLVQPGGSLRLSCAASGFTFAWYDMGWARQAPGKGLEWVSSIDDSGTHTYYADSVKGRFTISRDNSKNTLYLQMNSLRAEDTAVYYCATAERDDTYDYWGQGTLVTVSS

SEQ ID NO: 994 - protein, 118 aa, Homo sapiens
GVQLLESGGGLVQPGGSLRLSCAASGFTFAWYDMGWARQAPGKGLEWVSSIDDFGTHTYYADSVKGRFTISRDNSKNTLYLQMSSLRAEDTAVYYCATAERDDTFDFWGQGTLVTVSS

SEQ ID NO: 995 - protein, 118 aa, Homo sapiens
GVQLLESGGGLVQPGGSLRLSCAASGFTFAWYDMGWARQAPGKGLEWVSSIDDSGTQTYYADSVKGRFTISRDNSKNMLYLQMNSLRAEDTAVYYCATAERDDTYDYWGQGTLVTVSS

SEQ ID NO: 996 - protein, 118 aa, Homo sapiens
GVQLLESGGGLVQPGGSLRLSCAASGFTFAWYDMGWARQAPGKGLEWVSSIDDSGTQTYYADSVKGRFTISRDNSKNTLYLQMNSLRAEDTAVYYCAAAEWDDTFDYRGQGTLVIVSS

SEQ ID NO: 997 - protein, 118 aa, Homo sapiens
GVQLLESGGGLVQPGGSLRLSCAASGFTFAWYDMGWARQAPGKGLEWVSSIDDFGTHTYYADSVKGRFTIYRDNSKNTLYLQMNSLRAEDTAVYYCATAERDDTFDYWGQGTLVTVSS

SEQ ID NO: 998 - protein, 118 aa, Homo sapiens
GVQLLESGGGLVQPGGSLRLSCAASGFTFAWYDMGWARQAPGKGLEWVSSIDDFGTHTYYADSVKDRFTISRDNSKNTLYLQMNNLRAEDTAVYYCATAERDDTFDYWGQGTLVTVSS

SEQ ID NO: 999 - protein, 118 aa, Homo sapiens
GVQLLESGGGLVQPGGSLRLSCAASGFTFAWYDMGWARQAPGKGLEWVSSIDDFGTHTYYADSVKGRFTISRDNSKNTLYLQMNSLRAEDTAVYYCATAERDDTFDYWGQGTLVTVSS

SEQ ID NO: 1000 - protein, 118 aa, Homo sapiens
GVQLLESGGGLVQPGGSLRLSCAASGFTFAWYDMGWARQAPGKGLEWVSSIDDSGTQTYYADSVKGRFTISRDNYKNTLYLQMNSLRAEDTAVYYCATAERDDTFDYWGKGTLVTVSS

SEQ ID NO: 1001 - protein, 118 aa, Homo sapiens
GVQLLESGGGLVQPGGSLRLSCAASGFTFAWYDMGWARQAPGKGLEWVSSIDDSGTQTYYADSVKGRFTISRDNSKNTLYLQMNSLRAEDTAVYYCATAEMDDTYDYWGQGTLVTVSS

SEQ ID NO: 1002 - protein, 118 aa, Homo sapiens
GVQLLESGGGLVQPGGSLRLSCAASGFTFAWYDMGWARQAPGKGLEWVSSIDDSGTLTYYADSVKGRFTISRDNSKNTLYLQMNSLRAEDTAVYYCATAERDDTYDYWGQGTLVTVSS

SEQ ID NO: 1003 - protein, 118 aa, Homo sapiens
GVQLLESGGGLVQPGRSLRLSCAASGFTFAWYDMGWARQAPGKGLEWVSSIDDSGTQTYYADSVKGRFTISRDNSKNTLYLQMNSLRADDTAVYYCATAEREDTYDYWGQGTLVTVSS

SEQ ID NO: 1004 - protein, 118 aa, Homo sapiens
GVQLLESGGGLVQPGGSLRLSCAASGFIFAWYDMGWARQAPGKGLEWVSSIDDSGTQTYYADSVKGRFTISRDNSKNTLYLQMNSLRAEDTAVYYCATAERDDTYDYWGQGTLVTVSS

SEQ ID NO: 1005 - protein, 118 aa, Homo sapiens
GVQLLESGGGLVQPGGSLRLSCAASGFTFAWYDMGWARQAPGKGLEWVSSIDDSGTQTYYADSVKGRFTITRDNSKNTLYLQMNSLRAEDTAVYYCATAERDDTFDYWGQGTLVTVSS

SEQ ID NO: 1006 - protein, 118 aa, Homo sapiens
GVQLLESGGGLVQPGGSLRLSCAASGFIFAWYDMGWARQAPGKGLEWVSSIDDSGTQTYYADSVKGRFTISRDNSKNTLYLQMNSLRAEDTAVYYCATAERDDTFDYWGQGTLVTVSS

SEQ ID NO: 1007 - protein, 118 aa, Homo sapiens
GVQLLESGGGLVQPGGSLRLTCAASGFTFAWYDMGWARQAPGKGLEWVSSIDDSGTQTYYADSVKGRFTISRDNSKNTLYLQMNSLRAEDTAVYYCATAERDDTYDYWGQGTLVTVSS

SEQ ID NO: 1008 - protein, 118 aa, Homo sapiens
GVQLLESGGGLVQPGGSLRLSCAASGFTFAWYDMGWARQAPGKGLEWVSSIDDSGTRTYYADSVKGRFTISRDNSKNTLYLQMNSLRAEDTAVYYCATAERDDTFDYWGQGTLVTVSS

SEQ ID NO: 1009 - protein, 118 aa, Homo sapiens; identical to SEQ ID NO: 970

SEQ ID NO: 1010 - protein, 118 aa, Homo sapiens
GVRLLESGGGLVQPGGSLRLSCAASGFTFAWYDMGWARQAPGKGLEWVSSIDDSGTQTYYADSVKGRFTISRDNSKNTLYLQMNSLRAEDTAVYYCATAERDDTYDYWGQGTLVTVSS

SEQ ID NO: 1011 - protein, 118 aa, Homo sapiens
GVQLLESGGGLVQPGGSLRLSCAASGFTFAWYDMGWARQAPGKGLEWVSSIDDSGTQTYYADSVKGRFTISRDNSKNRLYLQMNSLRAEDTAVYYCATAERDDTYDYWGQGTLVTVSS

SEQ ID NO: 1012 - protein, 118 aa, Homo sapiens
GVQLLESGGGLVQPGGSLRLSCAASGFTFAWYDMGWARQAPGKDLEWVSSIDDSGTQTYYADSVKGRFTISRDNSKNTLYLQMNSLRAEDTAVYYCATAERDDTYDYWGQGTLVTVSS

SEQ ID NO: 1013 - protein, 118 aa, Homo sapiens
GVQLLESGGGLVQPGGSLRLSCAASGFTFAWYDMGWARQAPGKGLEWVSSIDDSGTRTYYADSVKGRFTISRDNSKNTLYLQMNSLRAEDTAVYYCATAERDDTYDYWGQGTLVTVSS

SEQ ID NO: 1014 - protein, 118 aa, Homo sapiens
GVQLLESGGGLVQPGGSLRLSCAASGFTFAWYDMGWARQAPGKGLEWVSTIDDSGTQTYYADSVKGRFTISRDNSKNTLYLQMNSLRAEDTAVYYCATAELEDTFDYWGQGTLVTVSS

SEQ ID NO: 1015 - protein, 118 aa, Homo sapiens
  VARIANT 55, 75: Xaa = Any Amino Acid
GVQLLESGGGLVQPGGSLRLSCAASGFTFAWYDMGWARQAPGKGLEWVSSIDDSXTQTYYADSVKGRFTISRDNXKNTLYLQMNSLRAEDTAVYYCATAERDDTFDYWGQGTLVTVSS

SEQ ID NO: 1016 - protein, 118 aa, Homo sapiens
GVQLLESGGGLVQPGGSLRLSCAASGFTFAWYDMGWARQAPGKGLEWVSSIDDSGTRTYYAGSVKGRFTISRDNSKNTLYLQMNSLRAEDTAVYYCATAERDDTYDYWGQGTLVTVSS

SEQ ID NO: 1017 - protein, 118 aa, Homo sapiens
GVQLLESGGGLVQPGGSLRLSCAASGFTFAWYDMGWARQAPGKGLEWVSSIDDSGRQTYYADSVKGRFTISRDNSKNTLYLQMNSLRAEDTAVYYCATAERDDTYDYWGQGTLVTVSS

SEQ ID NO: 1018 - protein, 118 aa, Homo sapiens
GVQLLESGGGLVQPGGSLRLSCAASGFTFAWYDMGWARQAPGKGLEWVSSIDDSGTQTYYADSVKGRFTISRDNSKNMLYLQMNSLRAEDTAVYYCATAERDDTFDYWGQGTLVTVSS

SEQ ID NO: 1019 - protein, 118 aa, Homo sapiens
GVQLLESGGGLVQPGGSLRLSCAASGFTFAWYDMGWARQAPGKGLEWVSSIDDSGTQTYYADSVKGRFTISRDNSKNKLYLQMNSLRAEDTAVYYCATAERDDTYDYWGQGTLVTVSS

SEQ ID NO: 1020 - protein, 118 aa, Homo sapiens
GVQLLESGGGLVQPGGSLRLSCAASGFTFVWYDMGWARQTPGKGLEWVSSIDDSGTQTYYADSVKGRFTISRDNSKNTLYLQMNSLRAEDTAVYYCATAESDDTYDYWGQGTLVTVSS

SEQ ID NO: 1021 - protein, 118 aa, Homo sapiens
GVQLLESGGGLVQPGGSLRLSCAASGFTFAWYDMGWARQAPGKGLEWVSSIDDSGTQTYYADSVKGRFTISRDNSKNTLYLQMNSLRAEDTAVYYCATAERDDIFDYWGQGTLVTVSS

SEQ ID NO: 1022 - protein, 118 aa, Homo sapiens
GVQLLESGGGLVQPGGSLRLSCAASGFTFAWYDMGWARQAPGKGLEWVSSIDDSGTQTYYADSVKGRFTISRDNSKNTLYLQMKSLRAEDTAVYYCATAERDDTSDYWGQGTLVTVSS

SEQ ID NO: 1023 - protein, 118 aa, Homo sapiens
GVQLLESGGGLVQPGGSLRLSCAASGFTFAWYDMGWVRQAPEKGLEWVSSIDDSGTQTYYADSVKGRFTISRDNSKNTLYLQMNSLRAEDTAVYYCATAEREDSYDYWGQGTLVTVSS

SEQ ID NO: 1024 - protein, 118 aa, Homo sapiens
GVQLLESGGGLVQPGGSLRLSCAASGFTFAWYDMGWARQAPGKGLEWVSVIDWHGTVTYYADSVKGRFTISRDNSKNTLYLQMNSLRAEDTAVYYCATAERDDTFDYWGQGTLVTVSS

SEQ ID NO: 1025 - protein, 118 aa, Homo sapiens
GVQLLESGGGLVQPGGSLRLSCAASGFTFAWYDMGWARQAPGKGLEWVSIITDTGGRTYYADSVKGRFTISRDNSKNTLYLQMNSLRAEDTAVYYCATAERDDTFDYWGQGTLVTVSS

SEQ ID NO: 1026 - protein, 118 aa, Homo sapiens
GVQLLESGGGLVQPGGSLRLSCAASGFTFAWYDMGWARQAPGKGLEWVSTIDWRGTITYYADSVKGRFTISRDNSKNTLYLQMNSLRAEDTAVYYCATAERDDTFDYWGQGTLVTVSS

SEQ ID NO: 1027 - protein, 118 aa, Homo sapiens
GVQLLESGGGLVQPGGSLRLSCAASGFTFAWYDMGWARQAPGKGLEWVSSIDWHGDVTYYADSVKGRFTISRDNSKNTLYLQMNSLRAEDTAVYYCATAERDDTFDYWGQGTLVTVSS

SEQ ID NO: 1028 - protein, 118 aa, Homo sapiens
GVQLLESGGGLVQPGGSLRLSCAASGFTFAWYDMGWARQAPGKGLEWVSTIDWHGSETYYADSVKGRFTISRDNSKNTLYLQMNSLRAEDTAVYYCATAERDDTFDYWGQGTLVTVSS

SEQ ID NO: 1029 - protein, 118 aa, Homo sapiens
GVQLLESGGGLVQPGGSLRLSCAASGFTFAWYDMGWARQAPGKGLEWVSTISWLGTHTYYADSVKGRFTISRDNSKNTLYLQMNSLRAEDTAVYYCATAERDDTFDYWGQGTLVTVSS

SEQ ID NO: 1030 - protein, 118 aa, Homo sapiens
GVQLLESGGGLVQPGGSLRLSCAASGFTFAWYDMGWARQAPGKGLEWVSSIDWHGTSTYYADSVKGRFTISRDNSKNTLYLQMNSLRAEDTAVYYCATAERDDTFDYWGQGTLVTVSS

SEQ ID NO: 1031 - protein, 118 aa, Homo sapiens
GVQLLESGGGLVQPGGSLRLSCAASGFTFAWYDMGWARQAPGKGLEWVSTIDWHGVVTYYADSVKGRFTISRDNSKNTLYLQMNSLRAEDTAVYYCATAERDDTFDYWGQGTLVTVSS

SEQ ID NO: 1032 - protein, 118 aa, Homo sapiens
GVQLLESGGGLVQPGGSLRLSCAASGFTFAWYDMGWARQAPGKGLEWVSSIDWHGNVTYYADSVKGRFTISRDNSKNTLYLQMNSLRAEDTAVYYCATAERDDTFDYWGQGTLVTVSS

SEQ ID NO: 1033 - protein, 118 aa, Homo sapiens
GVQLLESGGGLVQPGGSLRLSCAASGFTFAWYDMGWVRQAPGKGLEWVSQIDWHGLATYYADSVKGRFTISRDNSKNTLYLQMNSLRAEDTAVYYCATAERDDTFDYWGQGTLVTVSS

SEQ ID NO: 1034 - protein, 118 aa, Homo sapiens
GVQLLESGGGLVQPGGSLRLSCAASGFTFAWYDMGWVRQAPGKGLEWVSSIDWHGNKTYYADSVKGRFTISRDNSKNTLYLQMNSLRAEDTAVYYCATAERDDTFDYWGQGTLVTVSS

SEQ ID NO: 1035 - protein, 118 aa, Homo sapiens
GVQLLESGGGLVQPGGSLRLSCAASGFTFAWYDMGWVRQAPGKGLEWVSSIDWHGRPTYYADSVKGRFTISRDNSKNTLYLQMNSLRAEDTAVYYCATAERDDTFDYWGQGTLVTVSS

SEQ ID NO: 1036 - protein, 118 aa, Homo sapiens
GVQLLESGGGLVQPGGSLRLSCAASGFTFAWYDMGWVRQAPGKGLEWVSKISDLGCPTYYADSVKGRFTISRDNSKNTLYLQMNSLRAEDTAVYYCATAERDDTFDYWGQGTLVTVSS

SEQ ID NO: 1037 - protein, 118 aa, Homo sapiens
GVQLLESGGGVVQPGGSLRLSCAASGFTFAWYDMGWARQAPGKGLEWVSKITDYGFATYYADSVKGRFTVSRDNSKNTLYLQMNSLRAEDTAVYYCATAERDDTFDYWGQGTLVTVSS

SEQ ID NO: 1038 - protein, 118 aa, Homo sapiens
GVQLLESGGGLVQPGGSLRLSCAASGFTFAWYDMGWARQAPGKGLEWVSKITDLGYATYYADSVKGRFTISRDNSKNTLYLQMNSLRAEDTAVYYCATAERDDTFDYWGQGTLVTVSS

SEQ ID NO: 1039 - protein, 118 aa, Homo sapiens
GVQLLESGGGLVQPGGSLRLSCAASGFTFAWYDMGWARQAPGKGLEWVSRIEDNGRHTYYADSVKGRFTISRDNSKNTLYLQMNSLRAEDTAVYYCATAERDDTFDYWGQGTLVTVSS

SEQ ID NO: 1040 - protein, 118 aa, Homo sapiens
GVQLLESGGGLVQPGGSLRLSCAASGFTFAWYDMGWARQAPGKGLEWVSTIDDLGRHTYYADSVKGRFTISRDNSKNTLYLQMNSLRAEDTAVYYCATAERDDTFDYWGQGTLVTVSS

SEQ ID NO: 1041 - protein, 118 aa, Homo sapiens
GVQLLESGGGLVQPGGSLRLSCAASGFTFAWYDMGWARQAPGKGLEWVSTISWLGGNTYYADSVKGRFTISRDNSKNTLYLQMNSLRAEDTAVYYCATAERDDTFDYWGQGTLVTVSS

SEQ ID NO: 1042 - protein, 118 aa, Homo sapiens
GVQLLESGGGLVQPGGSLRLSCAASGFTFAWYDMGWVRQAPGKGLEWVSTITDLGYATYYADSVKGRFTISRDNSKNTLYLQMNSLRAEDTAVYYCATAERDDTFDYWGQGTLVTVSS

SEQ ID NO: 1043 - protein, 118 aa, Homo sapiens
GVQLLESGGGLVQPGGSLRLSCAASGFTFAWYDMGWARQAPGKGLEWVSSIDDSGTQTYYADSVRGRFTISRDNSKNTLYLQMNSLRAEDTAVYYCATAERDDTYDYWGQGTLVTVSS

SEQ ID NO: 1044 - protein, 118 aa, Homo sapiens
GVQLLESGGGLVQPGGSLRLSCAASGFTFAWYDMGWARQAPGKGLEWVSSIDDSGTQAYYADSVKGRFTISRDNSKNTLYLQMNSLRAEDTAVYYCATAERDDTYDYWGQGTLVTVSS

SEQ ID NO: 1045 - protein, 118 aa, Homo sapiens
GVQLLESGGGLVQPGGSLRLSCAASGFTFAWYDMGWARQAPGKGLEWVSSIDDSGMRTYYADSVKGRFTISRDNSKNTLYLQMDSLRAEDTAVYYCATAERDDTFDYWGQGTLVTVSS

SEQ ID NO: 1046 - protein, 118 aa, Homo sapiens
GVQLLESGGGLVQPGGSMRLSCAASGFTFAWYDMGWARQAPGKGLEWVSSIDDSGTQTYYADSVKGRFTISRDNSKNTLYLQMNSLRAEDTAVYYCATAERDDTYDYWGQGTLVTVSS

SEQ ID NO: 1047 - protein, 118 aa, Homo sapiens
GVQLLESGGGLIQPGGSLRLSCAASGFTFAWYDMGWARQAPGKGLEWVSSIDDSGTQTYYADSVKGRFTISRDNSKNTLYLQMNSLRAEDTAVYYCATAERDDTYDYWGQGTLVTVSS

SEQ ID NO: 1048 - protein, 118 aa, Homo sapiens
GVQLLESGGGLVQPGGSLRLSCAASGFTFAWYDMGWARQAPGKGLEWVSSIDDSGTQTYYADSVKGRFTISRDNFKNTLYLQMNSLRAEDTAVYYCATAERDDTYDYWGQGTLVTVSS

SEQ ID NO: 1049 - protein, 118 aa, Homo sapiens
GVQLLESGGGLVQPGGSLRLSCAASGFTFAWYDMGWARQAPGKGLEWVSSIDDSGTQTYYADSVKGRFTISRDNSKNTLYLQMSSLRAEDTAVYYCATAERDDTYDYWGQGTLVTVSS

SEQ ID NO: 1050 - protein, 118 aa, Homo sapiens
GVQLLESGGGLVQPGGSLRLSCAASGFTFAWYDMGWARQAPGKGLEWVSSIDDSGTQTYYADSVKGRFTISRDNSKNTLYLQMDSLRAEDTAVYYCATAERDDTYDYWGQGTLVTVSS

SEQ ID NO: 1051 - protein, 118 aa, Homo sapiens
GVQLLESGGGLVQPGGSLRLSCAASGFTFAWYDMGWARQAPGKGLEWVSSIDDSGMQTYYADSVKGRFTISRDNSKNTLYLQMNSLRTEDTAVYYCATAERDDTFDYWGQGTLVTVSS

SEQ ID NO: 1052 - protein, 118 aa, Homo sapiens
GVQLLESGGGLVQPGGSLRLSCAASGFTFAWYDMGWARQAPGKGLEWVSSIDDSGTHTYYADSVKGRFTISRDNSKNTLYLQMNSLRAEDTAVYYCATAERDDTFDYWGQGTLVTVSS

SEQ ID NO: 1053 - protein, 118 aa, Homo sapiens
GVQLLESGGGLVQPGGSLRLSCAASGFIFAWYDMGWARQAPGKGLEWVSSIDWHGNVTYYADSVKGRFTISRDNSKNTLYLQMNSLRAEDTAVYYCATAERDDTFDYWGQGTLVTVSS

SEQ ID NO: 1054 - protein, 118 aa, Homo sapiens
GVQLLESGGGLVQPGGSLRLSCAASGFIFAWYDMGWARQAPGKGLEWVSSIDWHGNVTYYADSVKGRFTISRDNSKNTLYLQMNSLRAEDTAVYYCATAERDDTYDYWGQGTLVTVSS

SEQ ID NO: 1055 - protein, 118 aa, Homo sapiens
GVKLLESGGGLVQPGGSLRLSCAASGFTFAWYDMGWARQAPGKGLEWVSSIDWHGNVTYYADSVKGRFTISRDNSKNTLYLQMNSLRAEDTAVYYCATAERDDTFDYWGQGTLVTVSS

SEQ ID NO: 1056 - protein, 118 aa, Homo sapiens
GVQLLESGGGLVQPGGSLRLSCAASGFTFAWYDMGWVRQAPGKGLEWVSSIDWHGNVTYYADSVKGRFTISRDNSKNTLYLQMNSLRAEDTAVYYCATAERDDTFDYWGQGTLVTVSS

SEQ ID NO: 1057 - protein, 118 aa, Homo sapiens
GVQLLESGGGLVQPGGSLRLSCAASGFTFAWYDMGWARQAPGKGLEWVSHIDWHGNHTYYADSVKGRFTISRDNSKNTLYLQMNSLRAEDTAVYYCATAERDDTFDYWGQGTLVTVSS

SEQ ID NO: 1058 - protein, 118 aa, Homo sapiens
GVQLLESGGGLVQPGGSLRLSCAASGFTFAWYDMGWARQAPGRGLEWVSTINWHGNNTYYADSVKGRFTISRDNSKNTLYLQMNSLRAEDTAVYYCATAERDDTFDYWGQGTLVTVSS

SEQ ID NO: 1059 - protein, 118 aa, Homo sapiens
GVQLLESGGGLVQPGGSLRLSCAASGFTFAWYDMGWARQAPGKGLEWVSTINWHGAVSYYADSVKGRFTISRDNSKNTLYLQMNSLRAEDTAVYYCATAERDDTFDYWGQGTLVTVSS

SEQ ID NO: 1060 - protein, 118 aa, Homo sapiens
GVQLLESGGGLVQPGGSLRLSCAASGFTFAWYDMGWARQAPGKGLEWVSLIDWMGHVTYYADSVKGRFTISRDNSKNTLYLQMNSLRAEDTAVYYCATAERDDTFDYWGQGTLVTVSS

SEQ ID NO: 1061 - protein, 118 aa, Homo sapiens
GVQLLESGGGLVQPGGSLRLSCAASGFTFAWYDMGWARQAPGKGLEWVSKIDWHGSVTYYADSVKGRFTISRDNSKNTLYLQMNSLRAEDTAVYYCATAEGDDTFDYWGQGTLVTVSS

SEQ ID NO: 1062 - protein, 118 aa, Homo sapiens
GVQLLESGGGLVQPGGSLRLSCAASGFTFAWYDMGWARQAPGKGLEWVSTIDWHGEPTYYADSVKGRFTISRDNSKNTLYLQMNSLRAEDTAVYYCATAERDDTFDYWGQGTLVTVSS

SEQ ID NO: 1063 - protein, 118 aa, Homo sapiens
GVQLLESGGGLVQPGGSLRLSCAASGFTFAWYDMGWARQAPGKGLEWVSTIDWHGQLTYYADSVKGRFTISRDNSKNTLYLQMNSLRAEDTAVYYCATAERDDTFDYWGQGTLVTVSS

SEQ ID NO: 1064 - protein, 118 aa, Homo sapiens
GVQLLESGGGLVQPGGSLRLSCAASGFTFAWYDMGWARQAPGKGLEWVSTIDWLGSVTYYADSVKGRFTISRDNSKNTLYLQMNSLRAEDTAVYYCATAERDDTFDYWGQGTLVTVSS

SEQ ID NO: 1065 - protein, 118 aa, Homo sapiens
GVQLLESGGGLVQPGGSLRLSCAASGFTFAWYDMGWARQAPGKGLEWVSAIDDLGRRTYYADSVKGRFTISRDNSKNTLYLQMNSLRAEDTAVYYCATAERDDTFDYWGQGTLVTVSS

SEQ ID NO: 1066 - protein, 118 aa, Homo sapiens
GVQLLESGGGLVQPGGSLRLSCAASGFTFAWYDMGWARQAPGKGLEWVSSIDDRGRYTYYADSVKGRFTISRDNSKNTLYLQMNSLRAEDTAVYYCATAERDDTFDYWGQGTLVTVSS

SEQ ID NO: 1067 - protein, 118 aa, Homo sapiens
GVQLLESGGGLVQPGGSLRLSCAASGFTFAWYDMGWARQAPGKGLEWVSVISDYGRGTYYADSVKGRFTISRDNSKNTLYLQMNSLRAEDTAVYYCATAEGDDTFDYWGQGTLVTVSS

SEQ ID NO: 1068 - protein, 118 aa, Homo sapiens
GVQLLESGGGLVQPGGSLRLSCAASGFTFAWYDMGWARQAPGKGLEWVSSIDDSGRYTYYADSVKGRFTISRDNSKNTLYLQMNSLRAEDTAVYYCATAERDDTFDYWGQGTLVTVSS

SEQ ID NO: 1069 - protein, 118 aa, Homo sapiens
GVQLLESGGGLVQPGGSLRLSCAASGFTFAWYDMGWARQAPGKGLEWVSVIDDVGRGTYYADSVKGRFTISRDNSKNTLYLQMNSLRAEDTAVYYCATAERDDTFDYWGQGTLVTVSS

SEQ ID NO: 1070 - protein, 118 aa, Homo sapiens
  VARIANT 108, 113: Xaa = Any Amino Acid
GVQLLESGGGLVQPGGSLRLSCAASGFIFAWYDMGWARQAPGKGLEWVSSIDWHGNVTYYADSVKGRFTISRDNSKNTLYLQMNSLRAEDTAVYYCATAEITKGYELXGVREXLVTVL

SEQ ID NO: 1071 - protein, 118 aa, Homo sapiens
  VARIANT 118: Xaa = Any Amino Acid
GVQLLESGGGLVQPGGSLRLSCAASGFIFAWYDMGWARQAPGKGLEWVSSIDWHGNVTYYADSVKGRFTISRDNSKNTLYLQMNSLRAEDTAVYYCATAETFLGYDYWGQGTLVTVLX

SEQ ID NO: 1072 - protein, 118 aa, Homo sapiens
  VARIANT 118: Xaa = Any Amino Acid
GVQLLESGGGLVQPGGSLRLSCAASGFIFAWYDMGWARQAPGKGLEWVSSIDWHGNVTYYADSVKGRFTISRDNSKNTLYLQMNSLRAEDTAVYYCATAEELAGYDYWGQGTLVTVYX

SEQ ID NO: 1073 - protein, 118 aa, Homo sapiens
  VARIANT 112, 118: Xaa = Any Amino Acid
GVQLLESGGGLVQPGGSLRLSCAASGFIFAWYDMGWARQAPGKGLEWVSSIDWHGNVTYYADSVKGRFTISRDNSKNTLYLQMNSLRAEDTAVYYCATAEREVGYDYWGQGXPGHRSX

SEQ ID NO: 1074 - protein, 118 aa, Homo sapiens
  VARIANT 118: Xaa = Any Amino Acid
GVQLLESGGGLVQPGGSLRLSCAASGFIFAWYDMGWARQAPGKGLEWVSSIDWHGNVTYYADSVKGRFTISRDNSKNTLYLQMNSLRAEDTAVYYCATAEQLAGYDYWGQGTLVTVYX

SEQ ID NO: 1075 - protein, 118 aa, Homo sapiens
  VARIANT 117, 118: Xaa = Any Amino Acid
GVQLLESGGGLVQPGGSLRLSCAASGFIFAWYDMGWARQAPGKGLEWVSSIDWHGNVTYYADSVKGRFTISRDNSKNTLYLQMNSLRAEDTAVYYCATAEHDELYDYWGQGTLVTVXX

SEQ ID NO: 1076 - protein, 118 aa, Homo sapiens
  VARIANT 117, 118: Xaa = Any Amino Acid
GVQLLESGGGLVQPGGSLRLSCAASGFIFAWYDMGWARQAPGKGLEWVSSIDWHGNVTYYADSVKGRFTISRDNSKNTLYLQMNSLRAEDTAVYYCATAERTPTYDYWGQGTLVTVXX

SEQ ID NO: 1077 - protein, 118 aa, Homo sapiens
  VARIANT 117: Xaa = Any Amino Acid
GVQLLESGGGLVQPGGSLRLSCAASGFIFAWYDMGWARQAPGKGLEWVSSIDWHGNVTYYADSVKGRFTISRDNSKNTLYLQMNSLRAEDTAVYYCATAEALKGYDYWGQGTLVTVXV

SEQ ID NO: 1078 - protein, 118 aa, Homo sapiens
  VARIANT 116, 117: Xaa = Any Amino Acid
GVQLLESGGGLVQPGGSLRLSCAASGFIFAWYDMGWARQAPGKGLEWVSSIDWHGNVTYYADSVKGRFTISRDNSKNTLYLQMNSLRAEDTAVYYCATAETISGYDYWGQGTLVTXXL

SEQ ID NO: 1079 - protein, 118 aa, Homo sapiens
GVQLLESGGGLVQPGGSLRLSCAASGFIFAWYDMGWARQAPGKGLEWVSSIDWHGNVTYYADSVKGRFTISRDNSKNTLYLQMNSLRAEDTAVYYCATAENFPGYDYWGQGTLVTVSS

SEQ ID NO: 1080 - protein, 118 aa, Homo sapiens
  VARIANT 61, 62: Xaa = Any Amino Acid
GVQLLESGGGLVQPGGSLRLSCAASGFIFWVYDMGWARQAPGKGLEWVSSIDWHGNVTYYXXSVKGRFTISRDNSKNTLYLQMNSLRAEDTAVYYCATAERDDTYDYWGQGTLVTVSS

SEQ ID NO: 1081 - protein, 118 aa, Homo sapiens
  VARIANT 61, 62: Xaa = Any Amino Acid
GVQLLESGGGLVQPGGSLRLSCAASGFIFWIYDMGWARQAPGKGLEWVSSIDWHGNVTYYXXSVKGRFTISRDNSKNTLYLQMNSLRAEDTAVYYCATAERDDTYDYWGQGTLVTVSS

SEQ ID NO: 1082 - protein, 118 aa, Homo sapiens
GVQLLESGGGLVQPGGSLRLSCAASGFIFAWYDMGWARQAPGKGLEWVSSIDWHGNVTYYADSVKGRFTISRDNSKNTLYLQMNSLRAEDTAVYYCATAEVDKGYDYWGQGTLVTVSS

SEQ ID NO: 1083 - protein, 118 aa, Homo sapiens
GVQLLESGGGLVQPGGSLRLSCAASGFIFAWYDMGWARQAPGKGLEWVSSIDWHGNVTYYADSVKGRFTISRDNSKNTLYLQMNSLRAEDTAVYYCATAEWLPSYDYWGQGTLVTVSS

SEQ ID NO: 1084 - protein, 118 aa, Homo sapiens
GVQLLESGGGLVQPGGSLRLSCAASGFIFAWYDMGWARQAPGKGLEWVSSIDWHGNVTYYADSVKGRFTISRDNSKNTLYLQMNSLRAEDTAVYYCATAESDPGYDYWGQGTLVTVSS

SEQ ID NO: 1085 - protein, 118 aa, Homo sapiens
GVRLLESGGGLVQPGGSLRLSCAASGFIFAWYDMGWARQAPGKGLEWVSSIDWHGNVTYYADSVKGRFTISRDNSKNTLYLQMNSLRAEDTAVYYCATAEKEVGYDYWGQGTLVTVLE

SEQ ID NO: 1086 - protein, 118 aa, Homo sapiens
GVQLLESGGGLVQPGGSLRLSCAASGFIFAWYDMGWARQAPGKGLEWVSSIDWHGNVTYYADSVKGRFTISRDNSKNTLYLQMNSLRAEDTAVYYCATAERDPGYDYWGQGTLVTVSS

SEQ ID NO: 1087 - protein, 118 aa, Homo sapiens
  VARIANT 76: Xaa = Any Amino Acid
GVQLLESGGGLVQPGGSLRLSCAASGFIFAWYDMGWARQAPGKGLEWVSSIDWHGNVTYYADSVKGRFTISRDNSXNTLYLQMNSLRAEDTAVYYCATAEKVPTYDYWGQGTLVTVSS

SEQ ID NO: 1088 - protein, 118 aa, Homo sapiens
GVQLLESGGGLVQPGGSLRLSCAASGFIFAWYDMGWARQAPGKGLEWVSSIDWHGNVTYYADSVKGRFTISRDNSKNTLYLQMNSLRAEDTAVYYCATAERVPGYDYWGQGTLVTVSS

SEQ ID NO: 1089 - protein, 118 aa, Homo sapiens
GVQLLESGGGLVQPGGSLRLSCAASGFIFAWYDMGWARQAPGKGLEWVSSIDWHGNVTYYADSVKGRFTISRDNSKNMLYLQMNSLRAEDTAVYYCATAEKDPGYDYWGQGTLVTVSS

SEQ ID NO: 1090 - protein, 118 aa, Homo sapiens
GVQLLESGGGLVQPGGSLRLSCAASGFIFAWYDMGWARQAPGKGLEWVSSIDWHGNVTYYADSVKGRFTISRDNSKNTLYLQMNSLRAEDTAVYYCATAEKEPGYDYWGQGTLVTVSS

SEQ ID NO: 1091 - protein, 118 aa, Homo sapiens
GVQLLESGGGLVQPGGSLRLSCAASGFIFAWYDMGWARQAPGKGLEWVSSIDWHGNVTYYADSVKGRFTISRDNSKNTLYLQMNSLRAEDTAVYYCATAEDEQGYDYWGQGTLVTVLE

SEQ ID NO: 1092 - protein, 118 aa, Homo sapiens; identical to SEQ ID NO: 1088

SEQ ID NO: 1093 - protein, 118 aa, Homo sapiens
GVQLLESGGGLVQPGGSLRLSCAASGFIFWIYDMAWARQAPGKGLEWVSSIDWHGNVTYYADSVKGRFTISRDNSKNTLYLQMNSLRAEDTAVYYCATAERDDTYDYWGQGTLVTVSS

SEQ ID NO: 1094 - protein, 118 aa, Homo sapiens
GVQLLESGGGLVQPGGSLRLSCAASGFIFMWYDMGWARQAPGKGLEWVSSIDWHGNVTYYADSVKGRFTISRDNSKNTLYLQMNSLRAEDTAVYYCATAERDDTYDYWGQGTLVTVSS

SEQ ID NO: 1095 - protein, 118 aa, Homo sapiens
GVQLLESGGGLVQPGGSLRLSCAASGFIFSWYDMKWARQAPGKGLEWVSSIDWHGNVTYYADSVKGRFTISRDNSKNTLYLQMNSLRAEDTAVYYCATAERDDTYDYWGQGTLVTVSS

SEQ ID NO: 1096 - protein, 118 aa, Homo sapiens
GVQLLESGGGLVQPGGSLRLSCAASGFIFAWYDMGWARQAPGKGLEWVSSIDWHGNVTYYADSVKGRFTISRDNSKNTLYLQMNSLRAEDTAVYYCATAEAEPGYDYWGQGTLVTVSS

SEQ ID NO: 1097 - protein, 118 aa, Homo sapiens
GVQLLESGGGLVQPGGSLRLSCAASGFIFAWYDMGWARQAPGKGLEWVSSIDWHGNVTYYADSVKGRFTISRDNSKNTLYLQMNSLRAEDTAVYYCATAEEEEGYDYWGQGTLVTVSS

SEQ ID NO: 1098 - protein, 118 aa, Homo sapiens
GVQLLESGGGLVQPGGSLRLSCAASGFIFAWYDMGWARQAPGKGLEWVSSIDWHGNVTYYADSVKGRFTISRDNSKNTLYLQMNSLRAEDTAVYYCATAEDDPGYDYWGQGTLVTVSS

SEQ ID NO: 1099 - protein, 118 aa, Homo sapiens
GVQLLESGGGLVQPGGSLRLSCAASGFIFAWYDMGWARQAPGKGLEWVSSIDWHGNVTYYADSVKGRFTISRDNSKNTLYLQMNSLRAEDTAVYYCATAEWEPGYDYWGQGTLVTILE

SEQ ID NO: 1100 - protein, 118 aa, Homo sapiens
GVQLLESGGGLVQPGGSLRLSCAASGFIFAWYDMGWARQAPGKGLEWVSSIDWHGNVTYYADSVKGRFTISRDNSKNTLYLQMNSLRAEDTAVYYCATAEEIPGYDYWGQGTLVTVLE

SEQ ID NO: 1101 - protein, 118 aa, Homo sapiens
GVQLLESGGGLVQPGGSLRLSCAASGFIFAWYDMGWARQAPGKGLEWVSSIDWHGNVTYYADSVKGRFTISRDNSKNTLYLQMNSLRAEDTAVYYCATAEDEPGYDYWGQGTLVTVSS

SEQ ID NO: 1102 - protein, 118 aa, Homo sapiens
GVQLLESGGGLVQPGGSLRLSCAASGFIFAWYDMGWARQAPGKGLEWVSSIDWHGNVTYYVDSVKGRFTISRDNSKNTLYLQMNSLRAEDTAVYYCATAETEPGYDYWGQGTLVTVSS

SEQ ID NO: 1103 - protein, 118 aa, Homo sapiens
GVQLLESGGGLVQPGGSLRLSCAASGFIFAWYDMGWARQAPGKGLEWVSSIDWHGNVTYYADSVKGRFTISRDNSKNTLYLQMNSLRAEDTAVYYCATAESIPGYDYWGQGTLVTVSS

SEQ ID NO: 1104 - protein, 118 aa, Homo sapiens
GVQLLESGGGLVQPGGSLRLSCAASGFIFAWYDMGWARQAPGKGLEWVSSIDWHGNVTYYADSVKGRFTISRDNSKNTLYLQMNSLRAEDTAVYYCATAEREPGYDYWGQGTLVTVSS

SEQ ID NO: 1105 - protein, 118 aa, Homo sapiens
GVQLLESGGGLVQPGGSLRLSCAASGFIFAWYDMGWARQAPGKGLEWVSSIDWHGNVTYYADSVKGRFTISRDNSKNTLYLQMNSLRAEDTAVYYCATAEKEEGYDYWGQGTLVTVSS

SEQ ID NO: 1106 - protein, 118 aa, Homo sapiens
GVQLLESGGGLVQPGGSLRLSCAASGFIFAWYDMGWARQAPGKGLEWVSSIDWHGNVTYYADSVKGRFTISRDNSKNTLYLQMNSLRAEDTAVYYCATAELDEGYDYWGQGTLVTVSS

SEQ ID NO: 1107 - protein, 118 aa, Homo sapiens
GVQLLESGGGLVQPGGSLRLSCAASGFIFAWYDMGWARQAPGKGLEWVSSIDWHGNVTYYADSVKGRFTISRDNSKNTLYLQMNSLRAEDTAVYYCATAEWWPGYDYWGQGTLVTVSS

SEQ ID NO: 1108 - protein, 118 aa, Homo sapiens
GVQLLESGGGLVQPGGSLRLSCAASGFIFAWYDMGWARQAPGKGLEWVSSIDWHGNVTYYADSVKGRFTISRDNSKNTLYLQMNSLRAEDTAVYYCATAESYKGYDYWGQGTLVTVSS

SEQ ID NO: 1109 - protein, 118 aa, Homo sapiens
GVQLLESGGGLVQPGGSLRLSCAASGFVFAWYDMGWARQAPGKGLEWVSSIDWHGNVTYYADSVKGRFTISRDNSKNTLYLQMNSLRAEDTAVYYCATAELDEGYDYWGQGTLVTVSS

SEQ ID NO: 1110 - protein, 118 aa, Homo sapiens
GVQLLESGGGLVQPGGSLRLSCAASGFIFAWYDMGWARQAPGKGLEWVSSIDWHGNVTYYADSVKGRFTISRDNSKNTLYLQMNSLRAEDTAVYYCATAEDTPGYDYWGQGTLVTVSS

SEQ ID NO: 1111 - protein, 118 aa, Homo sapiens
GVQLLESGGGLVQPGGSLRLSCAASGFIFAWYDMGWARQAPGKGLEWVSSIDWHGNVTYYADSVKGRFTISRDNSKNTLYLQMNSLRAEDTAVYYCATAEEEPGYDYWGQGTLVTVSS

SEQ ID NO: 1112 - protein, 118 aa, Homo sapiens
GVQLLESGGGLVQPGGSLRLSCAASGFIFAWYDMGWARQAPGKGLEWVSSIDWHGNVTYYADSVKGRFTISRDNSKNTLYLQMNSLRAEDTAVYYCATAEKTPGYDYWGQGTLVTVSS

SEQ ID NO: 1113 - protein, 118 aa, Homo sapiens
EVQLLESGGGLVQPGGSLRLSCAASGFIFAWYDMGWARQAPGKGLEWVSSIDWHGNVTYYADSVKGRFTISRDNSKNTLYLQMNSLRAEDTAVYYCATAEKEPGYDYWGQGTLVTVSS

SEQ ID NO: 1114 - protein, 118 aa, Homo sapiens
GVQLLESGGGLVQPGGSLRLSCAASGFIFAWYDMGWARQAPGKGLEWVSSIDWHGNVTYYADSVKGRFTISRDNSKNTLYLQMNSLRAEDTAVYYCATFERDDTYDYWGQGTLVTVSS

SEQ ID NO: 1115 - protein, 118 aa, Homo sapiens
GVQLLESGGGLVQPGGSLRLSCAASGFIFAWYDMGWARQAPGKGLEWVSSIDWHGNVTYYADSVKGRFTISRDNSKNTLYLQMNSLRAEDTAVYYCATTERDDTYDYWGQGTLVTVSS

SEQ ID NO: 1116 - protein, 118 aa, Homo sapiens
GVQLLESGGGLVQPGGSLRLSCAASGFIFAWYDMGWARQAPGKGLEWVSSIDWHGNVTYYADSVKGRFTISRDNSKNTLYLQMNSLRAEDTAVYYCATEERDDTYDYWGQGTLVTVSS

SEQ ID NO: 1117 - protein, 118 aa, Homo sapiens
GVQLLESGGGLVQPGGSLRLSCAASGFIFAWYDMGWARQAPGKGLEWVSSIDWHGNVTYYADSVKGRFTISRDNSKNTLYLQMNSLRAEDTAVYYCATSERDDTYDYWGQGTLVTVSS

SEQ ID NO: 1118 - protein, 118 aa, Homo sapiens
GVQLLESGGGLVQPGGSLRLSCAASGFIFAWYDMGWARQAPGKGLEWVSSIDWHGNVTYYADSVKGRFTISRDNSKNTLYLQMNSLRAEDTAVYYCATIERDDTYDYWGQGTLVTVSS

SEQ ID NO: 1119 - protein, 118 aa, Homo sapiens
GVQLLESGGGLVQPGGSLRLSCAASGFIFAWYDMGWARQAPGKGLEWVSSIDWHGNVTYYADSVKGRFTISRDNSKNTLYLQMNSLRAEDTAVYYCATATRDDTYDYWGQGTLVTVSS

SEQ ID NO: 1120 - protein, 118 aa, Homo sapiens
GVQLLESGGGLVQPGGSLRLSCAASGFIFAWYDMGWARQAPGKGLEWVSSIDWHGNVTYYADSVKGRFTISRDNSKNTLYLQMNSLRAEDTAVYYCATAERDETYDYWGQGTLVTVSS

SEQ ID NO: 1121 - protein, 118 aa, Homo sapiens
GVQLLESGGGLVQPGGSLRLSCAASGFIFAWYDVGWARQAPGKGLEWVSSIDWHGNVTYYADSVKGRFTISRDNSKNTLYLQMNSLRAEDTAVYYCATAERDDMYDYWGQGTLVTVSS

SEQ ID NO: 1122 - protein, 118 aa, Homo sapiens
GVQLLESGGGLVQPGGSLRLSCAASGFIFAWYDMGWARQAPGKGLEWVSSIDWHGNVTYYADSVKGRFTISRDNSKNTLYLQMNSLRAEDTAVYYCATAERDDTYLYWGQGTLVTVSS

SEQ ID NO: 1123 - protein, 118 aa, Homo sapiens
GVQLLESGGGLVQPGGSLRLSCAASGFIFAWYDMGWARQAPGKGLEWVSSIDWHGNVTYYADSVKGRFTISRDNSKNTLYLQMNSLRAEDTAVYYCATAEVEPGYDYWGQGTLVTVLE

SEQ ID NO: 1124 - protein, 119 aa, Homo sapiens
PGVQLLESGGGLVQPGGSLRLSCAASGFIFAWYDMGWARQAPGKGLEWVSSIDWHGNVTYYADSVKGRFTISRDNSKNTLYLQMNSLRAEDTAVYYCATAESEPGYDYWGQGTLVTVLE

SEQ ID NO: 1125 - protein, 118 aa, Homo sapiens
GVQLLESGGGLVQPGGSLRLSCAASGFIFAWYDMGWARQAPGKGLEWVSSIDWHGNVTYYADSVKGRFTISRDNSKNTLYLQMNSLRAEDTAVYYCATAEDLPGYDYWGQGTLVTVSS

SEQ ID NO: 1126 - protein, 118 aa, Homo sapiens
GVQLLESGGGLVQPGGSLRLSCAASGFIFAWYDMGWARQAPGKGLEWVSSIDWHGNVTYYADSVKGRFTISRDNSKNTLYLQMNSLRAEDTAVYYCATAESLPGYDYWGQGTLVTVSS

SEQ ID NO: 1127 - protein, 118 aa, Homo sapiens
GVQLLESGGGLVQPGGSLRLSCAASGFIFAWYDMGWARQAPGKGLEWVSSIDWHGNVTYYADSVKGRFTISRDNSKNTLYLQMNSLRAEDTAVYYCATAEYEPGYDYWGQGTLVTVSS

SEQ ID NO: 1128 - protein, 118 aa, Homo sapiens
GVQLLESGGGLVQPGGSLRLSCAASGFIFAWYDMGWARQAPGKGLEWVSSIDWHGNVTYYADSVKGRFTISRDNSKNTLYLQMNSLRAEDTAVYYCATAEQDPGYDYWGQGTLVTVSS

SEQ ID NO: 1129 - protein, 118 aa, Homo sapiens
GVQLLESGGGLVQPGGSLRLSCAASGFIFAWYDMGWARQAPGKGLEWVSSIDWHGNVTYYADSVKGRFTISRDNSKNTLYLQMNSLRAEDTAVYYCATAEMEPGYDYWGQGTLVTVLE

SEQ ID NO: 1130 - protein, 118 aa, Homo sapiens
GVQLLESGGGLVQPGGSLRLSCAASGFIFAWYDMGWARQAPGKGLEWVSSIDWHGNVTYYADSVKGRFTISRDNSKNTLYLQMNSLRAEDTAVYYCATAEEDPGYDYWGQGTLVTVSS

SEQ ID NO: 1131 - protein, 118 aa, Homo sapiens
GVQLLESGGGLVQPGGSLRLSCAASGFIFAWYDMGWARQAPGKGLEWVSSIDWHGNVTYYADSVKGRFTISRDNSKNTLYLQMNSLRAEDTAVYYCATAEFVPGYDYWGQGTLVTVSS

SEQ ID NO: 1132 - protein, 118 aa, Homo sapiens
GVQLLESGGGLVQPGGSLRLSCAASGFIFAWYDMGWARQAPGKGLEWVSGIDWHGNVTYYADSVKGRFTISRDNSKNTLYLQMNSLRAEDTAVYYCATAEDEPGYDYWGQGTLVTVSS

SEQ ID NO: 1133 - protein, 118 aa, Homo sapiens
GVQLLESGGGLVQPGGSLRLSCAASGFIFAWYDMGWARQAPGKGLEWVSYIDWHGNVTYYADSVKGRFTISRDNSKNTLYLQMNSLRAEDTAVYYCATAEDEPGYDYWGQGTLVTVSS

SEQ ID NO: 1134 - protein, 118 aa, Homo sapiens
GVQLLESGGGLVQPGGSLRLSCAASGFIFAWYDMGWARQAPGKGLEWVSKIDWHGNVTYYADSVKGRFTISRDNSKNTLYLQMNSLRAEDTAVYYCATAEDEPGYDYWGQGTLVTVSS

SEQ ID NO: 1135 - protein, 118 aa, Homo sapiens
GVQLLESGGGLVQPGGSLRLSCAASGFIFAWYDMGWARQAPGKGLEWVSVIDWHGNVTYYADSVKGRFTISRDNSKNTLYLQMNSLRAEDTAVYYCATAEDEPGYDYWGQGTLVTVSS

SEQ ID NO: 1136 - protein, 118 aa, Homo sapiens
GVQLLESGGGLVQPGGSLRLSCAASGFIFAWYDMGWARQAPGKGLEWVSIIDWHGNVTYYADSVKGRFTISRDNSKNTLYLQMNSLRAEDTAVYYCATAEDEPGYDYWGQGTLVTVSS

SEQ ID NO: 1137 - protein, 118 aa, Homo sapiens
GVQLLESGGGLVQPGGSLRLSCAASGFIFAWYDMGWARQAPGKGLEWVSNIDWHGNVTYYADSVKGRFTISRDNSKNTLYLQMNSLRAEDTAVYYCATAEDEPGYDYWGQGTLVTVSS

SEQ ID NO: 1138 - protein, 118 aa, Homo sapiens
GVQLLESGGGLVQPGGSLRLSCAASGFIFAWYDMGWARQAPGKGLEWVSWIDWHGNVTYYADSVKGRFTISRDNSKNTLYLQMNSLRAEDTAVYYCATAEDEPGYDYWGQGTLVTVSS

SEQ ID NO: 1139 - protein, 118 aa, Homo sapiens
GVQLLESGGGLVQPGGSLRLSCAASGFIFAWYDMGWARQAPGKGLEWVSRIDWHGNVTYYADSVKGRFTISRDNSKNTLYLQMNSLRAEDTAVYYCATAEDEPGYDYWGQGTLVTVSS

SEQ ID NO: 1140 - protein, 118 aa, Homo sapiens
GVQLLESGGGLVQPGGSLRLSCAASGFIFAWYDMGWARQAPGKGLEWVSSIPWHGNVTYYADSVKGRFTISRDNSKNTLYLQMNSLRAEDTAVYYCATAEDEPGYDYWGQGTLVTVSS

SEQ ID NO: 1141 - protein, 118 aa, Homo sapiens
GVQLLESGGGLVQPGGSLRLSCAASGFIFAWYDMGWARQAPGKGLEWVSSIWWHGNVTYYADSVKGRFTISRDNSKNTLYLQMNSLRAEDTAVYYCATAEDEPGYDYWGQGTLVTVSS

SEQ ID NO: 1142 - protein, 118 aa, Homo sapiens
GVQLLESGGGLVQPGGSLRLSCAASGFIFAWYDMGWARQAPGKGLEWVSSIVWHGNVTYYADSVKGRFTISRDNSKNTLYLQMNSLRAEDTAVYYCATAEDEPGYDYWGQGTLVTVSS

SEQ ID NO: 1143 - protein, 118 aa, Homo sapiens
GVQLLESGGGLVQPGGSLRLSCAASGFIFAWYDMGWARQAPGKGLEWVSSIIWHGNVTYYADSVKGRFTISRDNSKNTLYLQMNSLRAEDTAVYYCATAEDEPGYDYWGQGTLVTVSS

SEQ ID NO: 1144 - protein, 118 aa, Homo sapiens
  VARIANT 83, 95, 106, 117: Xaa = Any Amino Acid
GVQLLESGGGLVQPGGSLRLSCAASGFIFAWYDMGWARQAPGKGLEWVSSIQWHGNVTYYADSVKGRFTISRDNSKNTLYLQXNSLRAEDTPVYXCATAEDEPGYXYWGQGTLVTVXE

SEQ ID NO: 1145 - protein, 118 aa, Homo sapiens
GVQLLESGGGLVQPGGSLRLSCAASGFIFAWYDMGWARQAPGKGLEWVSSITWHGNVTYYADSVKGRFTISRDNSKNTLYLQMNSLRAEDTAVYYCATAEDEPGYDYWGQGTLVTVSS

SEQ ID NO: 1146 - protein, 118 aa, Homo sapiens
GVQLLESGGGLVQPGGSLRLSCAASGFIFAWYDMGWARQAPGKGLEWVSSIEWHGNVTYYADSVKGRFTISRDNSKNTLYLQMNSLRAEDTAVYYCATAEDEPGYDYWGQGTLVTVSS

SEQ ID NO: 1147 - protein, 118 aa, Homo sapiens
GVQLLESGGGLVQPGGSLRLSCAASGFIFAWYDMGWARQAPGKGLEWVSSIRWHGNVTYYADSVKGRFTISRDNSKNTLYLQMNSLRAEDTAVYYCATAEDEPGYDYWGQGTLVTVSS

SEQ ID NO: 1148 - protein, 118 aa, Homo sapiens
GVQLLESGGGLVQPGGSLRLSCAASGFIFAWYDMGWARQAPGKGLEWVSSIAWHGNVTYYADSVKGRFTISRDNSKNTLYLQMNSLRAEDTAVYYCATAEDEPGYDYWGQGTLVTVSS

SEQ ID NO: 1149 - protein, 118 aa, Homo sapiens
GVQLLESGGGLVQPGGSLRLSCAASGFIFAWYDMGWARQAPGKGLEWVSSIFWHGNVTYYADSVKGRFTISRDNSKNTLYLQMNSLRAEDTAVYYCATAEDEPGYDYWGQGTLVTVSS

SEQ ID NO: 1150 - protein, 118 aa, Homo sapiens
GVQLLESGGGLVQPGGSLRLSCAASGFIFAWYDMGWARQAPGKGLEWVSSIDWLGNVTYYADSVKGRFTISRDNSKNTLYLQMNSLRAEDTAVYYCATAEDEPGYDYWGQGTLVTVSS

SEQ ID NO: 1151 - protein, 118 aa, Homo sapiens
GVQLLESGGGLVQPGGSLRLSCAASGFIFAWYDMGWARQAPGKGLEWVSSIDWMGNVTYYADSVKGRFTISRDNSKNTLYLQMNSLRAEDTAVYYCATAEDEPGYDYWGQGTLVTVSS

SEQ ID NO: 1152 - protein, 118 aa, Homo sapiens
GVQLLESGGGLVQPGGSLRLSCAASGFIFAWYDMGWARQAPGKGLEWVSSIDWRGNVTYYADSVKGRFTISRDNSKNTLYLQMNSLRAEDTAVYYCATAEDEPGYDYWGQGTLVTVSS

SEQ ID NO: 1153 - protein, 118 aa, Homo sapiens
GVQLLESGGGLVQPGGSLRLSCAASGFIFAWYDMGWARQAPGKGLEWVSSIDWWGNVTYYADSVKGRFTISRDNSKNTLYLQMNSLRAEDTAVYYCATAEDEPGYDYWGQGTLVTVSS

SEQ ID NO: 1154 - protein, 118 aa, Homo sapiens
GVQLLESGGGLVQPGGSLRLSCAASGFIFAWYDMGWARQAPGQGLEWVSSIDWDGNVTYYADSVKGRFTISRDNSKNTLYLQMNSLRAEDTAVYYCATAEDEPGYDYWGQGTLVTVSS

SEQ ID NO: 1155 - protein, 118 aa, Homo sapiens
GVQLLESGGGLVQPGGSLRLSCAASGFIFAWYDMGWARQAPGKGLEWVSSIDWSGNVTYYADSVKGRFTISRDNSKNTLYLQMNSLRAEDTAVYYCATAEDEPGYDYWGQGTLVTVSS

SEQ ID NO: 1156 - protein, 118 aa, Homo sapiens
GVQLLESGGGLVQPGGSLRLSCAASGFIFAWYDMGWARQAPGKGLEWVSSIDWAGNVTYYADSVKGRFTISRDNSKNTLYLQMNSLRAEDTAVYYCATAEDEPGYDYWGQGTLVTVSS

SEQ ID NO: 1157 - protein, 118 aa, Homo sapiens
GVQLLESGGGLVQPGGSLRLSCAASGFIFAWYDMGWARQAPGKGLEWVSSIDWPGNVTYYADSVKGRFTISRDNSKNTLYLQMNSLRAEDTAVYYCATAEDEPGYDYWGQGTLVTVSS

SEQ ID NO: 1158 - protein, 118 aa, Homo sapiens
GVQLLESGGGLVQPGGSLRLSCAASGFIFAWYDMGWARQAPGKGLEWVSSIDWVGNVTYYADSVKGRFTISRDNSKNTLYLQMNSLRAEDTAVYYCATAEDEPGYDYWGQGTLVTVSS

SEQ ID NO: 1159 - protein, 118 aa, Homo sapiens
GVQLLESGGGLVQPGGSLRLSCAASGFIFAWYDMGWARQAPGKGLEWVSSIDWTGNVTYYADSVKGRFTISRDNSKNTLYLQMNSLRAEDTAVYYCATAEDEPGYDYWGQGTLVTVSS

SEQ ID NO: 1160 - protein, 118 aa, Homo sapiens
GVQLLESGGGLVQPGGSLRLSCAASGFIFAWYDMGWARQAPGKGLEWVSSIDWGGNVTYYADSVKGRFTISRDNSKNTLYLQMNSLRAEDTAVYYCATAEDEPGYDYWGQGTLVTVSS

SEQ ID NO: 1161 - protein, 118 aa, Homo sapiens
GVQLLESGGGLVQPGGSLRLSCAASGFIFAWYDMGWARQAPGKGLEWVSSIDWYGNVTYYADSVKGRFTISRDNSKNTLYLQMNSLRAEDTAVYYCATAEDEPGYDYWGQGTLVTVSS

SEQ ID NO: 1162 - protein, 118 aa, Homo sapiens
GVQLLESGGGLVQPGGSLRLSCAASGFIFAWYDMGWARQAPGKGLEWVSSIDWNGNVTYYADSVKGRFTISRDNSKNTLYLQMNSLRAEDTAVYYCATAEDEPGYDYWGQGTLVTVSS

SEQ ID NO: 1163 - protein, 118 aa, Homo sapiens
GVQLLESGGGLVQPGGSLRLSCAASGFIFAWYDMGWARQAPGKGLEWVSSIDWHGNGTYYADSVKGRFTISRDNSKNTLYLQMNSLRAEDTAVYYCATAEDEPGYDYWGQGTLVTVSS

SEQ ID NO: 1164 - protein, 118 aa, Homo sapiens
GVQLLESGGGLVQPGGSLRLSCAASGFIFAWYDMGWARQAPGKGLEWVSSIDWHGNLTYYADSVKGRFTISRDNSKNTLYLQMNSLRAEDTAVYYCATAEDEPGYDYWGQGTLVTVSS

SEQ ID NO: 1165 - protein, 118 aa, Homo sapiens
GVQLLESGGGLVQPGGSLRLSCAASGFIFAWYDMGWARQAPGKGLEWVSSIDWHGNMTYYADSVKGRFTISRDNSKNTLYLQMNSLRAEDTAVYYCATAEDEPGYDYWGQGTLVTVSS

SEQ ID NO: 1166 - protein, 118 aa, Homo sapiens
GVQLLESGGGLVQPGGSLRLSCAASGFIFAWYDMGWARQAPGKGLEWVSSIDWHGNRTYYADSVKGRFTISRDNSKNTLYLQMNSLRAEDTAVYYCATAEDEPGYDYWGQGTLVTVSS

SEQ ID NO: 1167 - protein, 118 aa, Homo sapiens
GVQLLESGGGLVQPGGSLRLSCAASGFIFAWYDMGWARQAPGKGLEWVSSIDWHGNYTYYADSVKGRFTISRDNSKNTLYLQMNSLRAEDTAVYYCATAEDEPGYDYWGQGTLVTVSS

SEQ ID NO: 1168 - protein, 118 aa, Homo sapiens
GVQLLESGGGLVQPGGSLRLSCAASGFIFAWYDMGWARQAPGKGLEWVSSIDWHGNFTYYADSVKGRFTISRDNSKNTLYLQMNSLCAEDTAVYYCATAEDEPGYDYWGQGTLVTVSS

SEQ ID NO: 1169 - protein, 118 aa, Homo sapiens
GVQLLESGGGLVQPGGSLRLSCAASGLIFAWYDMGWARQAPGKGLEWVSSIDWHGNKTYYADSVKGRFTISRDNSKNTLYLQMNSLRAEDTAVYYCATAEDEPGYDYWGQGTLVTVSS

SEQ ID NO: 1170 - protein, 118 aa, Homo sapiens
GVQLLESGGGLVQPGGSLRLSCAASGFIFAWYDMGWARQAPGKGLEWVSSIDWHGNSTYYADSVKGRFTISRDNSKNTLYLQMNSLRAEDTAVYYCATAEDEPGYDYWGQGTLVTVSS

SEQ ID NO: 1171 - protein, 118 aa, Homo sapiens
GVQLLESGGGLVQPGGSLRLSCAASGFIFAWYDMGWARQAPGKGLEWVSSIDWHGNATYYADSVKGRFTISRDNSKNTLYLQMNSLRAEDTAVYYCATAEDEPGYDYWGQGTLVTVSS

SEQ ID NO: 1172 - protein, 118 aa, Homo sapiens
GVQLLESGGGLVQPGGSLRLSCAASGFIFAWYDMGWARQAPGKGLEWVSSIDWHGNTTYYADSVKGRFTISRDNSKNTLYLQMNSLRAEDTAVYYCATAEDEPGYDYWGQGTLVTVSS

SEQ ID NO: 1173 - protein, 118 aa, Homo sapiens
GVQLLESGGGLVQPGGSLRLSCAASGFIFAWYDMGWARQAPGKGLEWVSSIDWHGNNTYYADSVKGRFTISRDNSKNTLYLQMNSLRAEDTAVYYCATAEDEPGYDYWGQGTLVTVSS

SEQ ID NO: 1174 - protein, 118 aa, Homo sapiens
GVQLLESGGGLVQPGGSLRLSCAASGFIFAWYDMGWARQAPGKGLEWVSSIDWHGNWTYYADSVKGRFTISRDNSKNTLYLQMNSLRAEDTAVYYCATAEDEPGYDYWGQGTLVTVSS

SEQ ID NO: 1175 - protein, 118 aa, Homo sapiens
GVQLLESGGGLVQPGGSLRLSCAASGFIFAWYDMGWARQAPGKGLEWVSSIDWHGSVTYYADSVKGRFTISRDNSKNTLYLQMNSLRAEDTAVYYCATAEDEPGYDYWGQGTLVTVSS

SEQ ID NO: 1176 - protein, 118 aa, Homo sapiens
GVQLLESGGGLVQPGGSLRLSCAASGFIFAWYDMGWARQAPGKGLEWVSSIDWHGQVTYYADSVKGRFTISRDNSKNTLYLQMNSLRAEDTAVYYCATAEDEPGYDYWGQGTLVTVSS

SEQ ID NO: 1177 - protein, 118 aa, Homo sapiens
GVQLLESGGGLVQPGGSLRLSCAASGFIFAWYDMGWVRQAPGKGLEWVSSIDWHGLVTYYADSVKGRFTISRDNSKNTLYLQMNSLRAEDTAVYYCATAEDEPGYDYWGQGTLVTVSS

SEQ ID NO: 1178 - protein, 118 aa, Homo sapiens
GVQLLESGGGLVQPGGSLRLSCAASGFIFAWYDMGWARQAPGKGLEWVSSIDWHGKVTYYADSVKGRFTISRDNSKNTLYLQMNSLRAEDTAVYYCATAEDEPGYDYWGQGTLVTVSS

SEQ ID NO: 1179 - protein, 118 aa, Homo sapiens
GVQLLESGGGLVQPGGSLRLSCAASGFIFAWYDMGWARQAPGKGLEWVSSIDWHGWVTYYADSVKGRFTISRDNSKNTLYLQMNSLRAEDTAVYYCATAEDEPGYDYWGQGTLVTVSS

SEQ ID NO: 1180 - protein, 118 aa, Homo sapiens
GVQLLESGGGLVQPGGSLRLSCAASGFIFAWYDMGWARQAPGKGLEWVSSIDWHGGVTYYADSVKGRFTISRDNSKNTLYLQMNSLRAEDTAVYYCATAEDEPGYDYWGQGTLVTVSS

SEQ ID NO: 1181 - protein, 118 aa, Homo sapiens
GVQLLESGGGLVQPGGSLRLSCAASGFIFAWYDMGWARQAPGKGLEWVSSIDWHGHVTYYADSVKGRFTISRDNSKNTLYLQMNSLRAEDTAVYYCATAEDEPGYDYWGQGTLVTVSS

SEQ ID NO: 1182 - protein, 118 aa, Homo sapiens
GVQLLESGGGLVQPGGSLRLSCAASGFIFAWYDMGWARQAPGKGLEWVSSIDWHGEVTYYADSVKGRFTISRDNSKNTLYLQMNSLRAEDTAVYYCATAEDEPGYDYWGQGTLVTVSS

SEQ ID NO: 1183 - protein, 118 aa, Homo sapiens
GVQLLESGGGLVQPGGSLRLSCAASGFIFAWYDMGWARQAPGKGLEWVSSIDWHGRVTYYADSVKGRFTISRDNSKNTLYLQMNSLRAEDTAVYYCATAEDEPGYDYWGQGTLVTVLE

SEQ ID NO: 1184 - protein, 118 aa, Homo sapiens
GVQLLESGGGLVQPGGSLRLSCAASGFIFAWYDMGWARQAPGKGLEWVSSIDWHGVVTYYADSVKGRFTISRDNSKNTLYLQMNSLRAEDTAVYYCATAEDEPGYDYWGQGTLVTVSS

SEQ ID NO: 1185 - protein, 118 aa, Homo sapiens
GVQLLESGGGLVQPGGSLRLSCAASGFIFAWYDMGWARQAPGKGLEWVSSIDWHGCVTYYADSVKGRFTISRDNSKNTLYLQMNSLRAEDTAVYYCATAEDEPGYDYWGQGTLVTVSS

SEQ ID NO: 1186 - protein, 118 aa, Homo sapiens
GVQLLESGGGLVQPGGSLRLSCAASGFIFAWYDMGWARQAPGKGLEWVSSIDWHGYVTYYADSVKGRFTISRDNSKNTLYLQMNSLRAEDTAVYYCATAEDEPGYDYWGQGTLVTVSS

SEQ ID NO: 1187 - protein, 118 aa, Homo sapiens
GVQLLESGGGLVQPGGSLRLSCAASGFIFAWYDMGWARQAPGKGLEWVSSIDWHGDVTYYADSVKGRFTISRDNSKNTLYLQMNSLRAEDTAVYYCATAEDEPGYDYWGQGTLVTVSS

SEQ ID NO: 1188 - protein, 118 aa, Homo sapiens
GVQLLESGGGLVQPGGSLRLSCAASGFIFAWYDMGWARQAPGKGLEWVSSIDWHGTVTYYADSVKGRFTISRDNSKNTLYLQMNSLRAEDTAVYYCATAEDEPGYDYWGQGTLVTVSS

SEQ ID NO: 1189 - protein, 118 aa, Homo sapiens
GVQLLESGGGLVQPGGSLRLSCAASGFIFAWYDMGWARQAPGKGLEWVSSIDWHGMVTYYADSVKGRFTISRDNSKNTLYLQMNSLRAEDTAVYYCATAEDEPGYDYWGQGTLVTVSS

SEQ ID NO: 1190 - protein, 118 aa, Homo sapiens
GVQLLESGGGLVQPGGSLRLSCAASGFIFNWYDMGWARQAPGKGLEWVSSIDWHGNVTYYADSVKGRFTISRDNSKNTLYLQMNSLRAEDTAVYYCATAEDEPGYDYWGQGTLVTVSS

SEQ ID NO: 1191 - protein, 118 aa, Homo sapiens
GVQLLESGGGLVQPGGSLRLSCAASGFIFHWYDMGWVRQAPGKGLEWVSSIDWHGNVTYYADSVKGRFTISRDNSKNTLYLQMNSLRAEDTAVYYCATAEDEPGYDYWGQGTLVTVSS

SEQ ID NO: 1192 - protein, 118 aa, Homo sapiens
GVQLLESGGGLVQPGGSLRLSCAASGFIFQWYDMGWARQAPGKGLEWVSSIDWHGDVTYYADSVKGRFTISRDNSKNTLYLQMNSLRAEDTAVYYCATAEDEPGYDYWGQGTLVTVSS

SEQ ID NO: 1193 - protein, 118 aa, Homo sapiens
GVQLLESGGGLVQPGGSLRLSCAASGFIFTWYDMGWARQAPGKGLEWVSSIDWHGNVTYYADSVKGRFTISRDNSKNTLYLQMNSLRAEDTAVYYCATAEDEPGYDYWGQGTLVTVSS

SEQ ID NO: 1194 - protein, 118 aa, Homo sapiens
GVQLLESGGGLVQPGGSLRLSCAASGFIFVWYDMGWARQAPGKGLEWVSSIDWHGNVTYYADSVKGRFTISRDNSKNTLYLQMNSLRAEDTAVYYCATAEDEPGYDYWGQGTLVTVSS

SEQ ID NO: 1195 - protein, 118 aa, Homo sapiens
GVQLLESGGGLVQPGGSLRLSCAASGFIFYWYDMGWARQAPGKGLEWVSSIDWHGNVTYYADSVKGRFTISRDNSKNTLYLQMNSLRAEDTAVYYCATAEDEPGYDYWGQGTLVTVSS

SEQ ID NO: 1196 - protein, 118 aa, Homo sapiens
  VARIANT 116, 117: Xaa = Any Amino Acid
GVQLLESGGGLVQPGGSLRLSCAASGFIFAVYDMGWARQAPGKGLEWVSSIDWHGNVTYYADSVKGRFTISRDNSKNTLYLQMNSLRAEDTAVYYCATAEDEPGYDYWGQGTLVTXXE

SEQ ID NO: 1197 - protein, 118 aa, Homo sapiens
GVQLLESGGGLVQPGGSLRLSCAASGFIFAWYDMMWARQAPGKGLEWVSSIDWHGNVTYYADSVKGRFTISRDNSKNTLYLQMNSLRAEDTAVYYCATAEDEPGYDYWGQGTLVTVSS

SEQ ID NO: 1198 - protein, 118 aa, Homo sapiens
GVQLLESGGGLVQPGGSLRLSCAASGFIFAWYDMYWVRQAPGKGLEWVSSIDWHGNVTYYADSVKGRFTISRDNSKNTLYLQMNSLRAEDTAVYYCATAEDEPGYDYWGQGTLVTVLE

SEQ ID NO: 1199 - protein, 118 aa, Homo sapiens
GVQLLESGGGLVQPGGSLRLSCAASGFIFAWYAMGWARQAPGKGLEWVSSIDWHGNVTYYADSVKGRFTISRDNSKNTLYLQMNSLRAEDTAVYYCATAEDEPGYDYLGQGTLVTVSS

SEQ ID NO: 1200 - protein, 118 aa, Homo sapiens
GVQLLESGGGLVQPGGSLRLSCAASGFIFAWYDMQWARQAPGKGLEWVSSIDWHGNVTYYADSVKGRFTISRDNSKNTLYLQMNSLRAEDTAVYYCATAEDEPGYDYWGQGTLVTVSS

SEQ ID NO: 1201 - protein, 118 aa, Homo sapiens
EVQLLESGGGLVQPGGSLRLSCAASGFIFAWYDMGWARQAPGKGLEWVSSIDWHGNVTYYADSVKGRFTISRDNSKNTLYLQMNSLRAEDTAVYYCATAEDEPGYDYWGQGTLVTVSS

SEQ ID NO: 1202 - protein, 118 aa, Homo sapiens
EVQLLESGGGLVQPGGSLRLSCAASGFIFAWYDMGWARQAPGKGLEWVSSIDWRGNVTYYADSVKGRFTISRDNSKNTLYLQMNSLRAEDTAVYYCATAEDEPGYDYWGQGTLVTVSS

SEQ ID NO: 1203 - protein, 118 aa, Homo sapiens
GVQLLESGGGLVQPGGSLRLSCAASGFIFAWYDMGWVRQAPGKGLEWVSSIDWHGNVTYYADSVKGRFTISRDNSKNTLYLQMNSLRAEDTAVYYCATAEDEPGYDYWGQGTLVTVSS

SEQ ID NO: 1204 - protein, 118 aa, Homo sapiens
GVQLLESGGGLVQPGGSLRLSCAASGFIFAWYDMGWVRQAPGKGLEWVSSIDWRGNVTYYADSVKGRFTISRDNSKNTLYLQMNSLRAEDTAVYYCATAEDEPGYDYWGQGTLVTVSS

SEQ ID NO: 1205 - protein, 118 aa, Homo sapiens
EVQLLESGGGLVQPGGSLRLSCAASGFIFAWYDMGWVRQAPGKGLEWVSSIDWHGNVTYYADSVKGRFTISRDNSKNTLYLQMNSLRAEDTAVYYCATAEDEPGYDYWGQGTLVTVSS

SEQ ID NO: 1206 - protein, 118 aa, Homo sapiens
EVQLLESGGGLVQPGGSLRLSCAASGFIFAWYDMGWVRQAPGKGLEWVSSIDWRGNVTYYADSVKGRFTISRDNSKNTLYLQMNSLRAEDTAVYYCATAEDEPGYDYWGQGTLVTVSS

SEQ ID NO: 1207 - protein, 118 aa, Homo sapiens
EVQLLESGGGLVQPGGSLRLSCAASGFIFAWYDMGWARQAPGKGLEWVSSIDWHGEVTYYADSVKGRFTISRDNSKNTLYLQMNSLRAEDTAVYYCATAEDEPGYDYWGQGTLVTVSS

SEQ ID NO: 1208 - protein, 118 aa, Homo sapiens
GVQLLESGGGLVQPGGSLRLSCAASGFIFAWYDMGWVRQAPGKGLEWVSSIDWHGEVTYYADSVKGRFTISRDNSKNTLYLQMNSLRAEDTAVYYCATAEDEPGYDYWGQGTLVTVSS

SEQ ID NO: 1209 - protein, 118 aa, Homo sapiens
EVQLLESGGGLVQPGGSLRLSCAASGFIFAWYDMGWVRQAPGKGLEWVSSIDWHGEVTYYADSVKGRFTISRDNSKNTLYLQMNSLRAEDTAVYYCATAEDEPGYDYWGQGTLVTVSS

SEQ ID NO: 1210 - protein, 118 aa, Homo sapiens
GVQLLESGGGLVQPGGSLRLSCAASGFIFQWYDMGWVRQAPGKGLEWVSSIDWHGDVTYYADSVKGRFTISRDNSKNTLYLQMNSLRAEDTAVYYCATAEDEPGYDYWGQGTLVTVSS

SEQ ID NO: 1211 - protein, 118 aa, Homo sapiens
EVQLLESGGGLVQPGGSLRLSCAASGFIFQWYDMGWVRQAPGKGLEWVSSIDWHGDVTYYADSVKGRFTISRDNSKNTLYLQMNSLRAEDTAVYYCATAEDEPGYDYWGQGTLVTVSS

SEQ ID NO: 1212 - protein, 118 aa, Homo sapiens
GVQLLESGGGLVQPGGSLRLSCAASGFIFAWYDMGWARQAPGKGLEWVSSIDWHGNVTYYADSVKGRFTISRDNSKNTLYLQMISLRAEDTAVYYCATAEDEPGYDYWGQGTLVTVSS

SEQ ID NO: 1213 - protein, 118 aa, Homo sapiens
GVQLLESGGGLVQPGGSLRLSCAASGFIFAWYDMGWARQAPGKGLEWVSSIDWHGNVTYYADSVKGRFIISRDNSKNTLYLQMNSLRAEDTAVYYCATAEDEPGYDYWGQGTLVTVSS

SEQ ID NO: 1214 - protein, 118 aa, Homo sapiens
GVQLLESGGGLVQPGGSLRLSCAASGFIFAWYDMGWARQAPGKGLEWVSSIDWHGNVIYYADSVKGRFTISRDNSKNTLYLQMNSLRAEDTAVYYCATAEDEPGYDYWGQGTLVTVSS

SEQ ID NO: 1215 - protein, 118 aa, Homo sapiens; identical to SEQ ID NO: 1171

SEQ ID NO: 1216 - protein, 118 aa, Homo sapiens
GVQLLESGGGLVQPGGSLRLSCAASGFIFAWYDMGWARQAPGKGLEWVSSIDWHGNVTYYADSEKGRFTISRDNSKNTLYLQMNSLRAEDTAVYYCATAEDEPGYDYWGQGTLVTVSS

SEQ ID NO: 1217 - protein, 118 aa, Homo sapiens
GVQLLESGGGLVQPGGSLRLSCAASGFIFAWYDMGWARQAPGKGLEWVTSIDWHGNVTYYADSVKGRFTISRDNSKNTLYLQMNSLRAEDTAVYYCATAEDEPGYDYWGQGTLVTVSS

SEQ ID NO: 1218 - protein, 118 aa, Homo sapiens
GVQLLESGGGLVQPGGSLRLSCAASGFIFAWYDMGWARQAPGKGLEWVSSIDWHGNVTYYADSVKGRFTISRDNSKNTLYLQMNSLRAEDTAVYYCATAEDEPGYDYWGHGTLVTVSS

SEQ ID NO: 1219 - protein, 118 aa, Homo sapiens
GVQLLESGGGLVHPGGSLRLSCAASGFIFAWYDMGWARQAPGKGLEWVSSIDWHGNVTYYADSVKGRFTISRDNSKNTLYLQMNSLRAEDTAVYYCATAEDEPGYDYWGQGTLVTVSS

SEQ ID NO: 1220 - protein, 118 aa, Homo sapiens
GVRLLESGGGLVQPGGSLRLSCAASGFIFAWYDMGWARQAPGKGLEWVSSIDWHGNVTYYADSVKGRFTISRDNSKNTLYLQMNSLRAEDTAVYYCATAEDEPGYDYWGQGTLVTVSS

SEQ ID NO: 1221 - protein, 118 aa, Homo sapiens
GVQLLESGGGLVQPGGSLRLSCAASGFIFAWYDMGWARQAPGKGLEWVSSIDWHGNVTYNADSVKGRFTISRDNSKNTLYLQMNSLRAEDTAVYYCATAEDEPGYDYWGQGTLVTVSS

SEQ ID NO: 1222 - protein, 118 aa, Homo sapiens
GVQLLESGGGLVQPGGSLRLSCAASGFIFAWYDMGWARQAPGKGLEWVSSIDWHDNVTYYADSVKGRFTISRDNSKNTLYLQMNSLRAEDTAVYYCATAEDEPGYDYWGQGTLVTVSS

SEQ ID NO: 1223 - protein, 118 aa, Homo sapiens
GVQLLESGGGLVQPGGSLRLSCAASGFIFAWYDMGWARQAPGKGLEWVSSIDWHGNVSYYADSVKGRFTISRDNSKNTLYLQMNSLRAEDTAVYYCATAEDEPGYDYWGQGTLVTVSS

SEQ ID NO: 1224 - protein, 118 aa, Homo sapiens
GVQLLESGGGLVQPGGSLRLSCAASGFIFAWYDMGWARQAPGKGLEWVSSIDWHGNVTYFADSVKGRFAISRDNSKNTLYLQMNSLRAEDTAVYYCATAEDEPGYDYWGQGTLVTVSS

SEQ ID NO: 1225 - protein, 118 aa, Homo sapiens
GVQLLESGGGLVQSGGSLRLSCAASGFIFAWYDMGWARQAPGKGLEWVSSIDWHGNVTYYADSVKGRFTISRDNSKNTLYLQMNSLRAEDTAVYYCATAEDEPGYDYWGQGTLVTVSS

SEQ ID NO: 1226 - protein, 118 aa, Homo sapiens; identical to SEQ ID NO: 1101

SEQ ID NO: 1227 - protein, 118 aa, Homo sapiens
GVQLSESGGGLVQPGGSLRLSCAASGFIFAWYDMGWARQAPGKGLEWVSSIDWHGNVTYYADSVKGRFTISRDNSKNTLYLQMNSLRAEDTAVYYCATAEDEPGYDYWGQGTLVTVSS

SEQ ID NO: 1228 - protein, 118 aa, Homo sapiens
GVQLLESGGGLVQPGGSLRLSCAASGFIFAWYDMGWARQAPGKGLEWVSSIDWHGNVTYYADSVKGRFTISRDNSKNTLYLQMNSLRAEDTAVYYCATAEDEPGYDYWGHGTVVTVSS

SEQ ID NO: 1229 - protein, 118 aa, Homo sapiens
GVQLLESGGGLVHPGGSLRLSCAASGFIFAWYDMGWARQAPGKGLEWVSSIDWHGNVTNYADSVKGRFTISRDNSKNTLYLQMNSLRAEDTAVYYCATAEDEPGYDYWGQGTLVTVSS

SEQ ID NO: 1230 - protein, 118 aa, Homo sapiens
GVQLLDSGGGLVQPGGSLRLSCAASGFIFAWYDMGWARQAPGKGLEWVSSIDWHGNVTYYADSVKGRFTISRDNSKNTLYLQMNSLRAEDTAVYYCATAEDEPGYDYWGQGTLVTVSS

SEQ ID NO: 1231 - protein, 118 aa, Homo sapiens
GVQLLESGGGLVQPGGSLRLSCAASGFIFAWYDMGWARQAPGKGLEWVSSIDWHGNDTYYADSVKGRFTISRDNSKNTLYLQMNSLRAEDTAVYYCATAEDEPGYDYWGQGTLVTVSS

SEQ ID NO: 1232 - protein, 118 aa, Homo sapiens
GVQLLESGGGLVQPGGSLRLSCAASGFIFAWYDMGWVRQAPGKGLEWVSSIDDHGNVTYYADSVKGRFTISRDNSKNTLYLQMNSLRAEDTAVYYCATAEDEPGYDYWGQGTLVTVSS

SEQ ID NO: 1233 - protein, 118 aa, Homo sapiens
GVQLLESGGGLVQPGGSLRLSCAASGFIFAWYDMGWVRQAPGKGLEWVSSIDWSGNVTYYADSVKGRFTISRDNSKNTLYLQMNSLRAEDTAVYYCATAEDEPGYDYWGQGTLVTVSS

SEQ ID NO: 1234 - protein, 118 aa, Homo sapiens
GVQLLESGGGLVQPGGSLRLSCAASGFIFAWYDMGWVRQAPGKGLEWVSSIDWHGTVTYYADSVKGRFTISRDNSKNTLYLQMNSLRAEDTAVYYCATAEDEPGYDYWGQGTLVTVSS

SEQ ID NO: 1235 - protein, 118 aa, Homo sapiens
GVQLLESGGGLVQPGGSLRLSCAASGFIFAWYDMGWVRQAPGKGLEWVSSIDWHGNQTYYADSVKGRFTISRDNSKNTLYLQMNSLRAEDTAVYYCATAEDEPGYDYWGQGTLVTVSS

SEQ ID NO: 1236 - protein, 118 aa, Homo sapiens
GVQLLESGGGLVQPGGSLRLSCAASGFIFAWYDMGWVRQAPGKGLEWVSKITDLGYATYYADSVKGRFTISRDNSKNTLYLQMNSLRAEDTAVYYCATAEDEPGYDYWGQGTLVTVSS

SEQ ID NO: 1237 - protein, 118 aa, Homo sapiens
GVQLLESGGGLVQPGGSLRLSCAASGFIFAWYDMGWARQAPGKGLEWVSSIDWHSNVTYYADSVKGRFTISRDNSKNTLYLQMNSLRAEDTAVYYCATAEDEPGYDYWGQGTLVTVSS

SEQ ID NO: 1238 - protein, 118 aa, Homo sapiens
GVQLLESGGGLVQPGGSLRLSCAASGFIFAWYDMGWARQAPGKGLEWVSHIDWHGNVTYYADSVKGRFTISRDNSKNTLYLQMNSLRAEDTAVYYCATAEDEPGYDYWGQGTLVTVSS

SEQ ID NO: 1239 - protein, 118 aa, Homo sapiens
GVQLLESGGGLVQPGGSLRLSCAASGFIFAWYDMGWARQAPGKGLEWVSTINDHGNVTYYADSVKGRFTISRDNSKNTLYLQMNSLRAEDTAVYYCATAEDEPGYDYWGQGTLVTVSS

SEQ ID NO: 1240 - protein, 118 aa, Homo sapiens
GVQLLESGGGLVQPGGSLRLSCAASGFIFAWYDMGWARQAPGKGLEWVSSIDWRGSVTYYADSVKGRFTISRDNSKNTLYLQMNSLRAEDTAVYYCATAEDEPGYDYWGQGTLVTVSS

SEQ ID NO: 1241 - protein, 118 aa, Homo sapiens
GVQLLESGGGLVQPGGSLRLSCAASGFIFAWYDMGWARQAPGKGLEWVSSIDWYGLVTYYADSVKGRFTISRDNSKNTLYLQMNSLRAEDTAVYYCATAEDEPGYDYWGQGTLVTVSS

SEQ ID NO: 1242 - protein, 118 aa, Homo sapiens
GVQLLESGGGLVQPGGSLRLSCAASGFIFAWYDMGWARQAPGKGLEWVSSIDWHGFVTYYADSVKGRFTISRDNSKNTLYLQMNSLRAEDTAVYYCATAEDEPGYDYWGQGTLVTVSS

SEQ ID NO: 1243 - protein, 119 aa, Homo sapiens
PGVQLLESGGGLVQPGGSLRLSCAASGFIFAWYDMGWARQAPGKGLEWVSSIDEPGRVTYYADSVKGRFTISRDNSKNTLYLQMNSLRAEDTAVYYCATAEDEPGYDYWGQGTLVTVSS

SEQ ID NO: 1244 - protein, 118 aa, Homo sapiens
GVQLLESGGGLVQPGGSLRLSCAASGFIFAWYDMGWVRQAPGKGLEWVSSIDWWGEVTYYADSVKGRFTISRDNSKNTLYLQMNSLRAEDTAVYYCATAEDEPGYDYWGQGTLVTVSS

SEQ ID NO: 1245 - protein, 118 aa, Homo sapiens
GVQLLESGGGLVQPGGSLRLSCAASGFIFAWYDMGWVRQAPGKGLEWVSSIDWRGIVTYYPDSVKGRFTISRDNSKNTLYLQMNSLRAEDTAVYYCATAEDEPGYDYWGQGTLVTVSS

SEQ ID NO: 1246 - protein, 118 aa, Homo sapiens
GVQLLESGGGLVQPGGSLRLSCAASGFIFAWYDMGWVRQAPGKGLEWVSSIDWRGLLTYYADSVKGRFTISRDNSKNTLYLQMNSLRAEDTAVYYCATAEDEPGYDYWGQGTLVIVSS

SEQ ID NO: 1247 - protein, 118 aa, Homo sapiens
GVQLLESGGGLVLPGGSLRLSCAASGFIFAWYDMGWARQAPGKGLEWVSSIDWRGGLTYYADSVKGRFTISRDNSKNTLYLQMNSLRAEDTAVYYCATAEDEPGYDYWGQGTLVTVSS

SEQ ID NO: 1248 - protein, 118 aa, Homo sapiens
GVQLLESGGGLVQPGGSLRLSCAASGFIFAWYDMGWARQAPGKGLEWVSSIDWRGKATYYADSVKGRFTISRDNSKNTLYLQMNSLRAEDTAVYYCATAEDEPGYDYWGQGTLVTVSS

SEQ ID NO: 1249 - protein, 118 aa, Homo sapiens
GVQLLESGGGLVQPGGSLRLSCAASGFIFAWYDMGWARQAPGKGLEWVSSIDWRGLSTYYADSVKGRFTISRDNSKNTLYLQMNSLRAEDTAVYYCATAEDEPGYDYWGQGTLVTVSS

SEQ ID NO: 1250 - protein, 118 aa, Homo sapiens
GVQLLESGGGLVQPGGSLRLSCAASGFIFAWYDMGWVRQAPGKGLEWVSSIDWHGKITYYADSVKGRFTISRDNSKNTLYLQMNSLRAEDTAVYYCATAEDEPGYDYWGQGTLVTVSS

SEQ ID NO: 1251 - protein, 118 aa, Homo sapiens
GVQLLESGGGLVQPGGSLRLSCAASGFIFAWYDMGWARQAPGKGLEWVSSIDWRGGTTYYADSVKGRFTISRDNSKNTLYLQMNSLRAEDTAVYYCATAEDEPGYDYWGQGTLVTVSN

SEQ ID NO: 1252 - protein, 118 aa, Homo sapiens
GVQLLESGGGLVQPGGSLRLSCAASGFIFAWYDMGWARQAPGKGLEWVSSIDWHGIETYYADSVKGRFTISRDNSKNTLYLQMNSLRAEDTAVYYCATAEDEPGYDYWGQGTLVTVSS

SEQ ID NO: 1253 - protein, 118 aa, Homo sapiens
GVQLLESGGGLVQPGGSLRLSCAASGFIFAWYDMGWARQAPGKGLEWVSSIDWHGSITYYADSVKGRFTISRDNSKNTLYLQMNSLRAEDTAVYYCATAEDEPGYDYWGQGTLVTVSS

SEQ ID NO: 1254 - protein, 118 aa, Homo sapiens
GVQLLESGGGLVQPGGSLRLSCAASGFIFAWYDMGWVRQAPGKGLEWVSSIDWYGTGTYYADSVKGRFTISRDNSKNTLYLQMNSLRAEDTAVYYCATAEDEPGYDYWGQGTLVTVSS

SEQ ID NO: 1255 - protein, 118 aa, Homo sapiens
GVQLLESGGGLVQPGGSLRLSCAASGFIFAWYDMGWARQAPGKGLEWVSSIDWRGTLTYYADSVKGRFTISRDNSKNTLYLQMNSLRAEDTAVYYCATAEDEPGYDYWGQGTLVTVSS

SEQ ID NO: 1256 - protein, 118 aa, Homo sapiens
GVQLLESGGGLVQPGGSLRLSCAASGFIFAWYDMGWARQAPGKGLEWVSSIDWRGLITYYADSVKGRFTISRDNSKNTLYLQMNSLRAEDTAVYYCATAEDEPGYDYWGQGTLVTVSS

SEQ ID NO: 1257 - protein, 118 aa, Homo sapiens
GVQLLESGGGLVQPGGSLRLSCAASGFIFAWYDMGWVRQAPGKGLEWVSSIDWLGKLTYYADSVKGRFTISRDNSKNTLYLQMNSLRAEDTAVYYCATAEDEPGYDYWGQGTLVTVSS

SEQ ID NO: 1258 - protein, 118 aa, Homo sapiens
GVQLLESGGGLVQPGGSLRLSCAASGFIFAWYDMGWVRQAPGKGLEWVSSIDWYGNVTYYADSVKGRFTISRDNSKNTLYLQMNSLRAEDTAVYYCATAEDEPGYDYWGQGTLVTVSS

SEQ ID NO: 1259 - protein, 118 aa, Homo sapiens
GVQLLESGGGLVQPGGSLRLSCAASGFIFAWYDMGWARQAPGKGLEWVSSINWLGNVTYYADSVKGRFTISRDNSKNTLYLQMNSLRAEDTAVYYCATAEDEPGYDYWGQGTLVTVSS

SEQ ID NO: 1260 - protein, 118 aa, Homo sapiens
GVQLLESGGGLVQPGGSLRLSCAASGFIFAWYDMGWARQAPGKGLEWVSSIGWHGNVTYYADSVKGRFTISRDNSKNTLYLQMNSLRAEDTAVYYCATAEDEPGYDYWGQGTLVTVSS

SEQ ID NO: 1261 - protein, 118 aa, Homo sapiens; identical to SEQ ID NO: 1158

SEQ ID NO: 1262 - protein, 118 aa, Homo sapiens
GVQLLESGGGLVQPGGSLRLSCAASGFIFAWYDMGWVRQAPGKGLEWVSSINDGGNVTYYADSVKGRFTISRDNSKNTLYLQMNSLRAEDTAVYYCATAEDEPGYDYWGQGTLVTVSS

SEQ ID NO: 1263 - protein, 118 aa, Homo sapiens
  VARIANT 106, 118: Xaa = Any Amino Acid
GVQLLESGGGLVQPGGSLRLSCAASGFIFAWYDMGWARQAPGKGLEWVSSIDWHGNVTYYADSVKGRFTISRDNSKNTLYLQMNSLRAEDTAVYYCATAEPFFSYXLLGSGKPWSPFX

SEQ ID NO: 1264 - protein, 119 aa, Homo sapiens
PGVQLLESGGGLVQPGGSLRLSCAASGFIFAWYDMGWARQAPGKGLEWVSSIDWRGDQTYYADSVKGRFTISRDNSKNTLYLQMNSLRAEDTAVYYCATAEDEPGYDYWGQGTLVTVSS

SEQ ID NO: 1265 - protein, 118 aa, Homo sapiens
GVQLLESGGGLVQPGGSLRLSCAASGFIFAWYDMGWARQAPGKGLEWVSSIDWQGNTTYYADSVKGRFTISRDNSKNTLYLQMNSLRAEDTAVYYCATAEDEPGYDYWGQGTLVTVSS

SEQ ID NO: 1266 - protein, 118 aa, Homo sapiens
GVQLLESGGGLVQPGGSLRLSCAASGFIFAWYDMGWVRQAPGKGLEWVSSIDWTGNVTYYADSVKGRFTISRDNSKNTLYLQMNSLRAEDTAVYYCATAEDEPGYDYWGQGTLVTVSS

SEQ ID NO: 1267 - protein, 118 aa, Homo sapiens
GVQLLESGGGLVQPGGSLRLSCAASGFIFAWYDMGWARQAPGKGLEWVSSISDRGNVTYYADSVKGRFTISRDNSKNTLYLQMNSLRAEDTAVYYCATAEDEPGYDYWGQGTLVTVSS

SEQ ID NO: 1268 - protein, 118 aa, Homo sapiens
GVQLLESGGGLVQPGGSLRLSCAASGFIFAWYDMGWARQAPGKGLEWVSSINDWGNVTYYADSVKGRFTISRDNSKNTLYLQMNSLRAEDTAVYYCATAEDEPGYDYWGQGTLVTVSS

SEQ ID NO: 1269 - protein, 118 aa, Homo sapiens
GVQLLESGGGLVQPGGSLRLSCAASGFIFAWYDMGWVRQAPGKGLEWVSSINDRGNVTYYADSVKGRFTISRDNSKNTLYLQMNSLRAEDTAVYYCATAEDEPGYDYWGQGTLVTVSS

SEQ ID NO: 1270 - protein, 118 aa, Homo sapiens
GVQLLESGGGLVQPGGSLRLSCAASGFIFAWYDMGWARQAPGKGLEWVSSIDWKGGKTYYADSVKGRFTISRDNSKNTLYLQMNSLRAEDTAVYYCATAEDEPGYDYWGQGTLVTVSS

SEQ ID NO: 1271 - protein, 118 aa, Homo sapiens
GVQLLESGGGLVQPGGSLRLSCAASGFIFAWYDMGWARQAPGKGLEWVSSINWHGNVTYYADSVKGRFTISRDNSKNTLYLQMNSLRAEDTAVYYCATAEDEPGYDYWGQGTLVTVSS

SEQ ID NO: 1272 - protein, 118 aa, Homo sapiens
GVQLLESGGGLVQPGGSLRLSCAASGFIFAWYDMGWARQAPGKGLEWVSVINWHGNVTYYADSVKGRFTISRDNSKNTLYLQMNSLRAEDTAVYYCATAEDEPGYDYWGQGTLVTVSS

SEQ ID NO: 1273 - protein, 118 aa, Homo sapiens
GVQLLESGGGLVQPGGSLRLSCAASGFIFAWYDMGWVRLAPGKGLEWVSMINWHGNVTYYADSVKGRFTISRDNSKNTLYLQMNSLRAEDTAVYYCATAEDEPGYDYWGQGTLVTVSS

SEQ ID NO: 1274 - protein, 118 aa, Homo sapiens
GVQLLESGGGLVQPGGSLRLSCAASGFIFAWYDMGWVRQAPGKGLEWVSKINWHGNVTYYADSVKGRFTVSRDNSKNTLYLQMNSLRAEDTAVYYCATAEDEPGYDYWGQGTLVTVSS

SEQ ID NO: 1275 - protein, 118 aa, Homo sapiens
GVQLLESGGGLVQPGGSLRLSCAASGFIFAWYDMGWVRQAPGKRLEWVSVINWHGNVTYYADSVKGRFTISRDNSKNTLYLQMNSLRAEDTAVYYCATAEDEPGYDYWGQGTLVTVSS

SEQ ID NO: 1276 - protein, 118 aa, Homo sapiens
GVQLLESGGGLVQPGGSLRLSCAASGFIFAWYDMGWVRQAPGKGLEWVSSISYHGNVTYYADSVKGRFTISRDNSKNTLYLQMNSLRAEDTAVYYCATAEDEPGYDYWGQGTLVTVSS

SEQ ID NO: 1277 - protein, 118 aa, Homo sapiens
GVQLLESGGGLVQPGGSLRLSCAASGFIFAWYDMGWARQAPGKGLEWVSHIESHGNVTYYADSVKGRFTISRDNSKNTLYLQMNSLRAEDTAVYYCATAEDEPGYDYWGQGTLVTVSS

SEQ ID NO: 1278 - protein, 118 aa, Homo sapiens
GVQLLESGGGLVQPGGSLRLSCAASGFIFAWYDMGWARQAPGKGLEWVSRITHHGNVTYYADSVKGRFTISRDNSKNTLYLQMNSLRAEDTAVYYCATAEDEPGYDYWGQGTLVTVSS

SEQ ID NO: 1279 - protein, 118 aa, Homo sapiens
GVQLLESGGGSVQPGGSLRLSCAASGFIFAWYDMGWVRQAPGKGLEWVSKIADHGNVTYYADSVKGRFTISRDNSKNTLYLQMNSLRAEDTAVYYCATAEDEPGYDYWGQGTLVTVSS

SEQ ID NO: 1280 - protein, 118 aa, Homo sapiens
GVQLLESGGGLVQPGGSLRLSCAASGFIFAWYDMGWVRQAPGKGLEWVSRIGAHGNVTYYADSVKGRFTISRDNSKNTLYLQMNSLRAEDTAVYYCATAEDEPGYDYWGQGTLVTVSS

SEQ ID NO: 1281 - protein, 118 aa, Homo sapiens
GVQLLESGGGLVQPGGSLRLSCAASGFIFAWYDMGWARQAPGKGLEWVSQISWHGNVTYYADSVKGRFTISRDNSKNTLYLQMNSLRAEDTAVYYCATAEDEPGYDYWGQGTLVTVSS

SEQ ID NO: 1282 - protein, 118 aa, Homo sapiens
GVQLLESGGGLVQPGGSLRLSCAASGFIFAWYDMGWVRQAPGKGLEWVSTINWHGNVTYYADSVKGRFTISRDNSKNTLYLQMNSLRAEDTAVYYCATAEDEPGYDYWGQGTLVTVSS

SEQ ID NO: 1283 - DNA, 326 bp, Homo sapiens
  misc_feature 325: n = A,T,C or G
gacatccagatgacccagtctccatcctccctgtctgcatctgtaggagaccgtgtcaccatcacttgccgggcaagtcagtggattgggccgtatttagagtggtaccagcagaaaccagggaaagcccctaagctcctgatctatacttcttcctttttgcaaagtggggtcccatcacgtttcagtggcagtggatctgggacagatttcactctcaccatcagcagtctgcaacctgaagattttgctacgtactactgtcaacagtcggtgtttattccttatacgttcggccaagggactaaggtggaaatcaaacggnc

SEQ ID NO: 1284 - DNA, 325 bp, Homo sapiens
gacatccagatgacccagtctccatcctccctgtctgcatctgtaggagaccgtgtcaccatcacttgccgggcaagtcagtcgattgcgtgggatttacattggtatcagcagaaaccagggaaagcccctaagctcctgatctatgatatgtccatgttgcaaagtggggtcccatcacgtttcagtggcagtggatctgggacagatttcactctcaccatcagcagtctgcaacctgaagattttgctacgtactactgtcaacagagttatgttcttccttttacgttcggccaagggaccaaggtggaaatcaaacggg

SEQ ID NO: 1285 - DNA, 324 bp, Homo sapiens
gacatccagatgacccagtctccatcctccctgtctgcatctgtaggagaccgtgtcaccatcacttgccgggcaagtcagtggattgggccgtatttaaattggtaccagcagaaaccagggaaagcccctaagctcctgatctatatggggtcctatttgcaaagtggggtcccatcacgtttcagtggcagtggatctgggacagatttcactctcaccatcagcagtctgcaacctgaagattttgctacgtactactgtcaacaggatctttatcctccttatacgttcggccaagggaccaaggtggaaatcaaacgg

SEQ ID NO: 1286 - DNA, 324 bp, Homo sapiens
gacatccagatgacccagtctccatcctccctgtctgcatctgtaggagaccgtgtcaccatcacttgccgggcaagtcagtggattgggccgtatttaaattggtaccagcagaaaccagggaaagcccctaagcccctgatctatatggggtcctatttgcaaagtggggtcccatcacgtttcagtggcagtggatctgggacagatttcactctcaccatcagcagtctgcaacctgaagattttgctacgtactactgtcaacaggatctttatcctccttatacgttcggccaagggaccaaggtggaaatcaaacgg

SEQ ID NO: 1287 - DNA, 324 bp, Homo sapiens
gacatccagatgacccagtctccatcctccctgtctgcatctgtaggagaccgtgtcaccatcacttgccgggcaagtcagtggattgggccgtatttaaattggtaccagcagaaaccagggaaagcccctaagctcctgatctatatggggtcctatttgccaagtggggtcccatcacgtttcagtggcagtggatctgggacagatttcactctcaccatcagcagtctgcaacctgaagattttgctacgtactactgtcaacaggatctttatcctccttatacgttcggccaagggaccaaggtggaaatcaaacgg

SEQ ID NO: 1288 - DNA, 324 bp, Homo sapiens
gacatccagatgacccagtctccatcctccctgtctgcatctgtaggagaccgtgtcaccatcacttgccgggcaagtcagtggattgggccgtatttaaattggtaccagcagaaaccagggaaagcccctaagctcctgatctatatggggtcctatttgcaaagtggggtcccatcacgtttcagtggcagtggatctgggacagatttcactctcaccatcagcagtctgcaacctgaagattttgctacgtactactgtcaacaggatctttatcctccttttacgttcggccaagggaccaaggtggaaatcaaacgg

SEQ ID NO: 1289 - DNA, 324 bp, Homo sapiens
gacatccagatgacccagtctccatcctccctgtctgcatctgtaggagaccgtgtcaccatcacttgccgggcaagtcagtggattgggccgtatttaaattggtaccagcagaaaccagggaaagcccctaagctcctgatctatgtggggtcctatttgcatagtggggtcccatcacgtttcagtggcagtggatctgggacagatttcactctcaccatcagcagtctgcaacctgaagattttgctacgtactactgtcaacaggatctttatcctccttatacgttcggccaagggaccaaggtggaaatcaaacgg

SEQ ID NO: 1290 - DNA, 324 bp, Homo sapiens
gacatccagatgacccagtctccatcctccctgtctgcatctgtaggagaccgtgtcaccatcacttgccgggcaagtcagtggattgggccgtatttaaattggtaccagcagaaaccagggaaagcccctaagctcctgatctatatggggtcctatttggtaagtggggtcccatcacgtttcagtggcagtggatctgggacagatttcactctcaccatcagcagtctgcaacctgaagattttgctacgtactactgtcaacaggatctttatcctccttatacgttcggccaagggaccaaggtggaaatcaaacgg

SEQ ID NO: 1291 - DNA, 324 bp, Homo sapiens
gacatccagatgacccagtctccatcctccctgtctgcatctgtaggagaccgtgtcaccatcacttgccgggcaagtcagtggattgggccgtatttaaattggtaccagcagaaaccagggaaagcccctaagctcctgatctatatggggtcctatttgtcaagtggggtcccatcacgtttcagtggcagtggatctgggacagatttcactctcaccatcagcagtctgcaacctgaagattttgctacgtactactgtcaacaggatctttatcctccttatacgttcggccaagggaccaaggtggaaatcaaacgg

SEQ ID NO: 1292 - DNA, 324 bp, Homo sapiens
  misc_feature 67: n = A,T,C or G
gacatccagatgacccagtctccatcctccctgtctgcatctgtaggagaccgtgtcaccatcactngccgggcaagtcagtggattgggccgtatttaaattggtaccagcagaaaccagggaaagcccctaagctcctgatctatatggggtcctatttgcaaagtggggtcccatcacgtttcagtggcagtggatctgggacagatttcactctcaccatcagcagtctgcaacctgaagattttgctacgtactactgtcaacaggatctttatcctccttttacgctcggccaagggaccaaggtggaaatcaaacgg

SEQ ID NO: 1293 - DNA, 324 bp, Homo sapiens
  misc_feature 67: n = A,T,C or G
gacatccagatgacccagtctccatcctccctgtctgcatctgtaggagaccgtgtcaccatcactngccgggcaagtcagtggattgggccgtatttaaattggtaccagcagaaaccagggaaagcccctaagctcctgatctatatggggtcctatttgcaaagtggggtcccatcacgtttcagtggcagtggatctgggacagatctcactctcaccatcagcagtctgcaacctgaagattttgctacgtactactgtcaacaggatctttatcctccttatacgttcggccaagggaccaaggtggaaatcaaacga

SEQ ID NO: 1294 - DNA, 324 bp, Homo sapiens
gacatccagatgacccagtctccatcctccctgtctgcatctgtaggagaccgtgtcaccatcacttgccgggcaagtcagtggattgggccgtatttaaattggtaccagcagaaaccagggaaagcccctaagctcctgatctatatggggtcctatttgcaaagtggggtcccatcacgtttcagtggcagtggatctgggacagatttcactctcaccatcagcagtctgcaacctaaagattttgctacgtactactgtcaacaggatctttatcctccttatacgttcggccaagggaccaaggtggaaatcaaacgg

SEQ ID NO: 1295 - DNA, 324 bp, Homo sapiens
gacatccagatgacccagtctccatcctccctgtctgcatctgtaggagaccgtgtcaccatcacttgccaggcaagtcagtggattgggccgtatctaaattggtaccagcagaaaccagggaaagcccctaagctcctgatgtatatggggtcctatttgcaaagtggggtcccatcacgtttcagtggcagtggatctgggacagatttcactttcaccatcagcagtctgcaacctgaagattttgctacgtactactgtcaacaggatctttatctcccttatacgtccggccaagggaccaaggtggaaatcaaacgg

SEQ ID NO: 1296 - DNA, 324 bp, Homo sapiens
gacatccagatgacccagtctccatcctccctgtctgcatctgtaggagaccgtgtcaccatcacttgccgggcaagtcagtggattgggccgtatttaaattggtaccagcagaaaccagggaaagcccctaagctcctgatctatatggggtcctatttgcaaagtggggtcccatcacgtttcagaggcagtggatctgggacagatttcactctcaccatcagcagtctgcaacctgaagattttgctacgtactactgtcaacaggatctttatcctccttatacgttcggccaagggaccaaggtggaaatcaaacgg

SEQ ID NO: 1297 - DNA, 324 bp, Homo sapiens
gacatccagatgacccagtctccatcctccctgtctgcatctgtaggagaccgtgtcaccatcacttgccgggcaagtcagtggattgggccgtatttaaattggtaccagcagaaaccagggaaagcccctaagctcctgatctatatggggtcctatttgcatagtggggtcccatcacgtttcagtggcagtggatctgggacagatttcactctcaccatcagcagtctgcaacctgaagactttgctacgtactactgtcaacaggatctttatcctccttatacgttcggccaagggaccaaggtggaaatcaaacgg

SEQ ID NO: 1298 - DNA, 324 bp, Homo sapiens
gacatccagatgacccagtctccatcctccctgtctgcatctgtaggagaccgtgtcaccatcatttgccgggcaagtgaatggattgggccgtatttaaattggtaccagcagaaaccagggaaagcccctaagctcctgatctatatggggtcctatttgcaaagtggggtcccatcacgtttcagtggcagtggatcagggacagatttcactctcaccatcagcagtcagcaacctgaagattttgctacgtactactgtcaacaggatctttatcctccttatacgttcggccaagggaccaaggtggaaatcaaacgg

SEQ ID NO: 1299 - DNA, 324 bp, Homo sapiens
  misc_feature 67: n = A,T,C or G
gacatccagatgacccagtctcaatcctccctgtctgcatatgtaggagaccgtgtcaccatcactngccgggcaagtcagtggattgggccgtatttaaattggtaccagcagaaacaagggaaagcccctaagctcctgatctatatggggtcctatttgcaaagtggggtcccatcacgtttcagtggcagtggatctgggacagatttcactctcaccatcagcagtctgcaacctgaagattttgctacgtactactgtcaacaggatctttatcctccttatacgttcggccaagggaccaaggtggaaatcaaacgg

SEQ ID NO: 1300 - DNA, 324 bp, Homo sapiens
gacatccagatgacccagtctccatcctccctgtctgcatatgtaggagaccgtgtcaccatcacttgccgggcaagtcagtggattgggccgtatttaaattggtaccagcagaaaccagggaaagcccctaagctcctgatctatatggggtcctatttgcaaagtggggtcccatcacgtttcagtggcagtggatctgggacagatttcactctcaccatcagcagtctgcaacctgaagattttgctacgtactactgtcaacaggatctttatcctccttatacgttcggccaagggaccaatgtggaaatcaaacgg

SEQ ID NO: 1301 - DNA, 324 bp, Homo sapiens
  misc_feature 67: n = A,T,C or G
gacatccagatgacccagtctccatcctccccctctgcatctgtaggagaccgtgtcaccatcactngccgggcaagtcagtggattgggccgtatttaaattggtaccagcagaaagcagggaaagcccctaagctcctgatctatatggggtcctatttgcaaagtggggtcccatcacgtttcagtggcagtggatctgggacagatttcactctcaccatcagcagtctgcaacctgaagattttgctacgtactactgtcaacaggatctttatcctccttatacgttcggccaagggaccaaggtggaaatcaaacgg

SEQ ID NO: 1302 - DNA, 324 bp, Homo sapiens
gacatccagatgacccagtctccatcctccctgtctgcatctgtaggagaccgtgtcaccatcacttgccgggcaagtcagtggattgggccgtatttaaattggtaccagcagaaaccagggaaagcccccaagctcctgatctatatggggtcctatttgcaaagtggggtcccatcacgtttcagtggcagtggatctgggacagatttcactctcaccatcagcagtctgcaacctgaagattttgctacgtactactgtcaacaggatctttatcctccttatacgttcggccaagggaccaagctggaaatcaaacgg

SEQ ID NO: 1303 - DNA, 324 bp, Homo sapiens
gacatccagatgacccagtctccatcctccctgtctgcatctgtaggagaccgtgtcaccatcacttgccgagcaagtcagtggagtgggccgtatttaaattggtaccagcagaaaccagggaaagcccctaagctcctgatctatatggggtcctatttgcaaagtggggtcccatcacgtttcagtggcagtggatctgggacagatttcactctcaccatcagcagtctgcaacctgaagattttgctacgtactactgtcaacaggatctttatcctccttatacgttcggccaagggaccaaggtggaaatcaaacgg

SEQ ID NO: 1304 - DNA, 324 bp, Homo sapiens
gacatccagatgacccagtctccatcctccctgtctgcatctgtaggagaccgtgtcaccatcacgtgccaggcaagtcagtggattgggccgtatttaaattggtaccagcagaaaccagggaaagcccctaagctcctgatctatatggggtcctatttgcaaagtggggtcccatcacgtttcagtggcagtggatctgggacagatttcaccctcaccatcagcagtctgcaacctgaagattttgctacgtactactgtcaacaggatctttatcctccttatacgttcggccaagggaccaaggtggaaatcaaacgg

SEQ ID NO: 1305 - DNA, 324 bp, Homo sapiens
gacatccagatgacccagtctccatcctccctgtctgcatctgtaggagaccgtgtcaccatcacttgccgggcaagtcagtggattgggccgtatttaaattggtaccagcagaaaccagggagagcccctaagctcctgatctatatggggtcctatttgcaaagtggggtcccatcacgtttcagtggcagtggatctgggacagatttcactctcaccatcagcagtctgcaacctgaagattttgctacgtactactgtcaacaggatctttatcctccttatacgttcggccaagggaccaaggtggaaatcaaacgg

SEQ ID NO: 1306 - DNA, 324 bp, Homo sapiens
gacatccagatgacccagtctccatcctccctgtctgcatctgtaggagaccgtgtcaccatcatttgccgggcaagtcagtggattgggccgtatttaaattggtaccagcagaaaccagggaaagcccctaagctcctgatctatatgggggcctatttgcaaagtggggtcccatcacgtttcagtggcagtggatctgggacagatttcactctcaccatcagcagtctgcaacctgaagattttgctacgtactactgtcaacaggatctttatcctccttatacgttcggccaagggaccaaggtggaaatcaaacgg

SEQ ID NO: 1307 - DNA, 324 bp, Homo sapiens
  misc_feature 67: n = A,T,C or G
gacatccagatgacccagtctccatcctccctgtctgcatctgtaggagaccgtgtcaccatcactngccgggcaagtcagtggattgggccgtatttaaattggtaccagcagaaaccagggaaagcccctatgctcctgatctatatggggtcctatttgcaaagtggggtcccatcacgtttcagtggcagtggatctgggacagatttcactctaaccatcagcagtctgcaacctgaagattttgctacgtactactgtcaacaggatctttatcctccttatacgttcggccaagggaccaaggtggaaatcaaacgg

SEQ ID NO: 1308 - DNA, 324 bp, Homo sapiens
  misc_feature 67: n = A,T,C or G
gacatccagatgacccagtctccatcctccctgtctgcatctgtaggagaccgtgtcatcatcactngccgggcaagtcagtggattgggccgtatttaaattggtaccagcagaaaccagggaaagcccctaagctcctgatctatatggggtcctatttgcaaagtgaggtcccatcacgtttcagtggcagtggatctgggacagatttcactctcaccatcagcagtctgcaacctgaagattttgctacgtactactgtcaacaggatctttatcctccttatacgttcggccaagggaccaaggtggaaatcaaacgg

SEQ ID NO: 1309 - DNA, 324 bp, Homo sapiens
gacatccagatgacccagtctccatcctccctgtctgcatctgtaggagaccgtgccaccatcacttgccgggcaagtcagtggattgggccgtatttaaattggtaccagcagaaaccatggaaagcccctaagctcctgatctatatggggtcctatttgcaaagtggggtcccatcacgtttcagtggcagtggatctgggacagatttcactctcaccatcagcagtctgcaacctgaagattttgctacgtactactgtcaacaggatctttatcctccttatacgttcggccaagggaccaaggtggaaatcaaacgg

SEQ ID NO: 1310 - DNA, 324 bp, Homo sapiens
  misc_feature 107: n = A,T,C or G
gacatccagatgacccagtctccatcctccctgtctgcatctgtaggagaccgtgtcaccatcacttgccgggcaagtcagtggattgggccgtatttaaattggtnccagcagaaaccagggaaagcccctaagcccctgatctatatggggaggtgggcgccgagcggggtcccatcacgcttcagtggcagtggatctgggacagatttcactctcaccatcagcagtctgcaacctgaagattttgctacgtactactgtcaacaggatctttatcctccttttacgttcggccaagggaccaaggtggaaatcaaacgg

SEQ ID NO: 1311 - DNA, 324 bp, Homo sapiens
  misc_feature 107: n = A,T,C or G
gacatccagatgacccagtctccatcctccctgtctgcatctgtaggagaccgtgtcaccatcacttgccgggcaagtcagtggattgggccgtatttaaattggtnccaacagaaaccagggaaagcccctaagcccctgatctatatggggtatcacgcgccgagtggggtcccatcacgcttcagtggcagtggatctgggacagatttcactctcaccatcagcagtctgcaacctgaagattttgctacgtactactgtcaacaggatctttatcctccttttacgttcggccaagggaccaaggtggaaatcaaacgg

SEQ ID NO: 1312 - DNA, 324 bp, Homo sapiens
  misc_feature 107: n = A,T,C or G
gacatccagatgacccagtctccatcctccctgtctgcatctgtaggagaccgtgtcaccatcacttgccgggcaagtcagtggattgggccgtatttaaattggtnccagcagaaaccagggaaagcccctaagcccctgatctatatggggtattgggcgagcagtggggtcccatcacgcttcagtggcagtggatctgggacagatttcactctcaccatcagcagtctgcaacctgaagattttgctacgtactactgtcaacaggatctttatcctccttttacgttcggccaagggaccaaggtggaaatcaaacgg

SEQ ID NO: 1313 - DNA, 324 bp, Homo sapiens
  misc_feature 107: n = A,T,C or G
gacatccagatgacccagtctccatcctccctgtctgcatctgtaggagaccgtgtcaccatcacttgccgggcaagtcagtggattgggccgtatttaaattggtnccagcagaaaccagggaaagcccctaagcctctgatctatatggggtattgggcgatcagtggggtcccatcacgcttcagtggcagtggatctgggacagatttcactctcaccatcagcagtctgcaacctgaagattttgctacgtactactgtcaacaggatctttatcctccttttacgttcggccaagggaccaaggtggaaatcaaacgg

SEQ ID NO: 1314 - DNA, 324 bp, Homo sapiens
gacatccagatgacccagtctccatcctccctgtctgcatctgtaggagaccgtgtcaccatcacttgccgggcaagtcagtggattgggccgtatttaaattggtttcaacagaaaccagggaaagcccctaagcccctgatctatatggggtattgggcgccgtccggggtcccatcacgcttcagtggcagtggatctgggacagatttcactctcaccatcagcagtctgcaacctgaagattttgctacgtactactgtcaacaggatctttatcctccttttacgttcggccaagggaccgaggtggaaatcaaacgg

SEQ ID NO: 1315 - DNA, 324 bp, Homo sapiens
gacatccagatgacccagtctccatcctccctgtctgcatctgtaggagaccgtgtcaccatcacttgccgggcaagtcagtggattgggccgtatttaaattggtaccaacagaaaccagggaaagcccctaagcccctgatctatatggggttctgggcgccgagtggggtcccatcacgcttcagtggcagtggatctgggacagatttcactctcaccatcagcagtctgcaacctgaagattttgctacgtactactgtcaacaggacctttatcccccttttacgttcggccaagggaccaaggtggaaatcaaacgg

SEQ ID NO: 1316 - DNA, 324 bp, Homo sapiens
gacatccagatgacccagtctccatcctccctgtctgcatctgtaggagaccgtgtcaccatcacttgccgggcaagtcagtggattgggccgtatttaaattggtaccagcagaaaccagggaaagcccctaagcccctgatctatatggggttctgcgcgccgagtggggtcccatcacgcttcagtggcagtggatctgggacagatttcactctcaccatcagcagtctgcaacctgaagattttgctacgtactactgtcaacaggatctttatcctccttttacgttcggccaagggaccaaggtggaaatcaaacgg

SEQ ID NO: 1317 - DNA, 324 bp, Homo sapiens
gacatccagatgacccagtctccatcctccctgtctgcatctgtaggagaccgtgtcaccatcacttgccgggcaggtcagtggattgggccgtatttaaattggtaccaacagaaaccagggaaagcccctaagcccctgatctatatggggtattgggcgcccagtggggtcccatcacgcttcagtggcagtggatctgggacagatttcactctcaccatcagcagtctgcaacctgaagattttgctacgtactactgtcaacaggatctttatcctccttttacgttcggccaagggaccaaggtggaaatcaaacgg

SEQ ID NO: 1318 - DNA, 324 bp, Homo sapiens
  misc_feature 114: n = A,T,C or G
gacatccagatgacccagtctccatcctccctgtctgcatctgtaggagaccgtgtcaccatcacttgccgggcaagtcagtggattgggccgtatttaaattggtaccagcanaaaccagggaaagcccctaagcccctgatctatatggggtattgggcgcccagtggggtcccatcacgcttcagtggcagtggatctgggacagatttcactctcaccatcagcagtctgcaacctgaagattttgctacgtactactgtcaacaggatctttatcctccttttacgttcggccaagggaccaaggtggaaatcggacgg

SEQ ID NO: 1319 - DNA, 324 bp, Homo sapiens
gacatccagatgacccagtctccatcctccctgtctgcatctgtaggagaccgtgtcaccatcacttgccgggcaagtcagtggattgggccgtatttaaattggtacaaacagaaaccagggaaagcccctaagcccctgatctatatggggtattgggcggggagtggggtcccatcacgcttcagtggcagtggatctgggacagatttcactctcaccatcagcagtctgcaacctgaagattttgctacgtactactgtcaacaggatctttatcctccttttacgttcggccaagggaccaaggtggaaatcagacgg

SEQ ID NO: 1320 - DNA, 324 bp, Homo sapiens
gacatccagatgacccagtctccatcctccctgtctgcatctgtaggagaccgtgtcaccatcacttgccgggcaagtcagtggattggggcctatttaaattggtaccaacagaaaccagggaaagcccctaagcccctgatctatatggggtattgggcgccgagtggggtcccatcacgcttcagtggcagtagatctgggacagatttcactctcaccatcagcagtctgcaacctgaagattttgctacgtactactgtcaacaggatctttatcctccttttacgttcggccaagggaccaaggtggaaatcaaacgg

SEQ ID NO: 1321 - DNA, 324 bp, Homo sapiens
gacatccagatgacccagtctccatcctccctgtctgcatctgtaggagaccgtgtcaccatcacttgccgggcaagtcagtggattgggccgtatttaaattggtaccaacagaaaccagggaaagcccctaagcccctgatctatatggggtattgggcgccgagtggggtcccatcacgcttcagtggcagtggatctgggacagatttcactctcaccatcagcagtctgcaacctgaagattttgctacgtactactgtcaacaggatgggtatcctccttttacgttcggccaaggtaccaaggtggaaatcaaacgg

SEQ ID NO: 1322 - DNA, 324 bp, Homo sapiens
gacatccagatgacccagtctccatcctccctgtctgcatctgtaggagaccgtgtcaccatcacttgccgggcaagtcagtggattgggccgtatttaaattggtaccaacagaaaccagggaaagcccctaagcccctgatctatatggggtattgggcgccgagtggggtcccatcacgcttcagtggcagtggatctgggacagatttcactctcaccatcagcagtctgcaacctgaagattttgctacgtactactgtcaacaggatgtctatcctccttttacgttcggccaagggaccaaggtggaaatcaaacgg

SEQ ID NO: 1323 - DNA, 324 bp, Homo sapiens
gacatccagatgacccagtctccatcctccctgtctgcatctgtaggagaccgtgtcaccatcacttgccgggcaagtcagtggattgggccgtatttaaattggtaccaacagaaaccagggaaagcccctaagcccctgatctatatggggtattgggcgccgagtggggtcccatcacgcttcagtggcagtggatctgggacagatttcactctcaccatcagcagtctgcaacctgaagattttgctacgtactactgtcaacaggatttctatcctccttttacgttcggccaagggaccaaggtggaaatcaaacgg

SEQ ID NO: 1324 - DNA, 324 bp, Homo sapiens
gacatccagatgacccagtctccatcctccctgtctgcatctgtaggagaccgtgtcaccatcacttgccgggcaagtcagtggattgggccgtatttaaattggtaccaacagaaaccagggaaagcccctaagcccctgatctatatggggtattgggcgccgagtggggtcccatcacgcttcagtggcagtggatctgggacagatttcactctcaccatcagcagtctgcaacctgaggattttgctacgtactactgtcaacaggatcttttgcctccttttacgttcggccaagggaccaaggtggaaatcaaacgg

SEQ ID NO: 1325 - DNA, 324 bp, Homo sapiens
gacatccagatgacccagtctccatcctccctgtctgcatctgtaggagaccgtgtcaccatcacttgccgggcaagtcagtggattgggccgtatttaaattggtaccaacagaaaccagggaaagcccctaagcccctgatctatatggggtattgggcgccgagtggggtcccatcacgcttcagtggcagtggatctgggacagatttcactctcaccatcagcagtctgcaacctgaagattctgctacgtactactgtcaacaggatatctatcctccttttacgttcggccaagggaccaaggtggaaatcaaacgg

SEQ ID NO: 1326 - DNA, 324 bp, Homo sapiens
gacatccagatgacccagtctccatcctccctgtctgcatctgtaggagaccgtgtcaccatcacttgccgggcaagtcagtggattgggccgtatttaaattggtaccaacagaaaccagggaaagcccctaagcccctgatctatatggggtattgggcgccgagtggggtcccatcacgcttcagtggcagtggatctgggacagatttcactctcaccatcagcagtctgcaacctgaagattttgctacgtactactgtcaacaggattggtatcctccttttacgttcggccaagggaccaaggtggaaatcaaacgg

SEQ ID NO: 1327 - DNA, 324 bp, Homo sapiens
gacatccagatgacccagtctccatcctccctgtctgcatctgtaggagaccgtgtcaccatcacttgccgggcaagtcagtggattgggccgtatttaaattggtaccagcagaaaccagggaaagcccctaagctcctgatctatatggggtcctatttgcaaagtggggtcccatcacgtttcagtggcagtggatctaggacagatttcactctcaccatcagcagtctgcaacctgaagattttgctacgtactactgtcaacaggatctttatcctccttatacgttcggccaagggacccaggtggaaatcaaacgg

SEQ ID NO: 1328 - DNA, 324 bp, Homo sapiens
gacatccagatgacccagtctccatcctccctgtctgcatctgtaggagaccgtgtcaccatcacttgccgggcaagtcagtggattgggccgtatttaaattggtaccagcagaaaccagggaaagcccctaagctcctgatctatatggggtcctatttgcaaagtggggtcccatcacgtttcagtggcagtggatctgggacagatttcactctcaccatcagcaatctgcaacctgaagattttgttacgtactactgtcaacaggatctttatcctccttatacgttcggccaagggaccaaggtggaaatcaaacgg

SEQ ID NO: 1329 - DNA, 324 bp, Homo sapiens; identical to SEQ ID NO: 426

SEQ ID NO: 1330 - DNA, 324 bp, Homo sapiens
gacatccagatgacccagtctccatccatcctgtctgcatctgtaggagaccgtgtcaccatcacttgcctggcaagtcagtggattgggccgtatttaaattggtaccagcagaaaccagggaaagcccctaagctcctgatctatatggggtcctatttgcaaagcggggtcccatcacgtttcagtggcagtggatctgggacagatttcactttcaccatcagcagtctgcaacctgaagattttgctacgtactactgtcaacaggatctttatcctccttatacgttcggccaagggaccaaggtggaaatcaaacgg

SEQ ID NO: 1331 - DNA, 324 bp, Homo sapiens
gacatccaggtgacccagtccccatccgccctgtctgcatctgtaggagaccgtgtcaccatcacttgccgggcaagtcagtggattgggccgtatctaaattggtaccagcagaaaccagggaaagcccctaagcccctgatctatatggggtcctatctgccaagtggggtcccatcacgcttcagtggcagtggatctgggacagatttcactctcaccatcagcagtctgcaacctgaagattttgctacgtactactgtcaacaggatctgtatcctccttatacgttcggccaggggaccaaggtggaaatcaaacgg

SEQ ID NO: 1332 - DNA, 324 bp, Homo sapiens
gacatccagatgacccagtctccatcctccctgtctgcatctgtaggagaccgtgtcaccatcacttgccgggcaagccagtggattgggccgtatttaaattggtaccagcagaaaccagggaaagcccctaagcccctgatctatatggggtcctatctgccaagtggggtcccatcacgtttcagtggcagtggatctgggacagatttcactctcaccatcagcagtctgcaacctgaagattttgctacgtactactgtcaacaggatctttatcctccttatacgttcggccaagggaccaaggtggaaatcaaacgg

SEQ ID NO: 1333 - DNA, 324 bp, Homo sapiens
gacatccagatgacccagtctccatcctccctgtctgcatctgtaggagaccgtgtcaccatcacttgccgggcaagtcagtggattgggccgtatttaaattggtaccagcagaaaccagggaaagcccctaagcccctgatctatatggggtcctatctgccaagtggggtcccatcacgtttcagtggcagtgggtctgggacagatttcactctcaccatcagcagtctgcaacctgaagattttgctacgtactactgccaacaggatctttatcctccttatacgttcggccaagggaccaaggtggaaatcaaacgg

SEQ ID NO: 1334 - DNA, 324 bp, Homo sapiens
gacatccagatgacccagtctccatcctccctgtctgcatctgtaggagaccgtgtcaccatcacttgccgggcaagtcagtggattgggccgtatttaaattggtaccagcagaaaccagggaaagcccctaagcccctgatttatatggggtcctatttgccaagtggggtcccatcacgtttcagtggcagtggatctgggacagatttcactctcaccatcaatagtctgcaacctgaagattttgctacgtactactgtcaacaggatctttatcctccttttacgttcggccaagggaccaaggtggaaatcaaacgg

SEQ ID NO: 1335 - DNA, 324 bp, Homo sapiens
gacatccagatgacccagtccccatcctccctgtctgcatctgtaggagaccgtgtcaccatcacttgccgggcaggtcagtggattgggccgtacttaaattggtaccagcagaaatcagggaaagcccctaagcccctgatttatatggggtcctatttgccaagtggggtcccatcacgtttcagtggcagtggatctgggacagatttcactctcaccatcaatagtctgcaacctgaagattttgctacgtactactgtcaacaggatctttatcctcctttcacgttcggccaagggaccaaggtgggaatcaaacgg

SEQ ID NO: 1336 - DNA, 324 bp, Homo sapiens
gacatccagatgacccagtctccatcctccctgtctgcatctgtaggagaccgtgtcaccatcacttgccaggcaagtcagtggattgggccgtatttaaattggtaccagcagaaaccaggggaagcccctaaacccctgatctatatggggtcctatttgccaagtggggtcccatcacgtttcagtggcagtggatctgggacagatttcactctcaccatcagcagtctgcaacctgaagattttgctacgtactactgtcaacaggatctttatcctccttttacgttcggccaagggaccaaggtggaaatcaaacgg

SEQ ID NO: 1337 - DNA, 324 bp, Homo sapiens
gacatccagatgacccagtctccatcctccctgtctgcatctgtaggagaccgtgtcaccatcacttgccgggcaagtcagtggattgggccgtatttaaattggtaccagcagaaaccaggggaagcccctaaacccctgatctatatggggtcctatttgccaagtggggtcccatcacgtttcagtggcagtggatctgggacagatttcactctcaccatcagcagtctgcaacctgaagactttgctacgtactactgtcaacaggatctttatcctccttttacgttcggccaagggaccaaggtggaaatcaaacgg

SEQ ID NO: 1338 - DNA, 324 bp, Homo sapiens
gacatccagatgacccagtctccatcctccctgtctgcatctgtaggagaccgtgtcaccatcacttgccgggcaagtcagtggattgggccgtatttaaattggtaccaacagaaaccagggaaagcccctaagcccctgatctatatggggtcctatctgccaagtggggtcccatcacgcttcagtggcagtggatctgggacagatttcactctcaccatcagcagtctgcaacctgaagattttgctacgtactactgtcaacaggatctttatcctccttttacgttcggccaagggaccaaggtggaaatcaaacgg

SEQ ID NO: 1339 - DNA, 324 bp, Homo sapiens
gacatccagatgacccagtctccatcctccctgtctgcatctgtaggagaccgtgtcaccatcacttgccgggcaagtcagtggattgggccgtatctaaattggtaccagcagaaaccagggaaagcccctaagcccctgatctatatggggtcctatctgccaagtggggtcccatcacgcttcagtggcagtggatctgggacagatttcactctcaccatcagcagtctgcaacctgaagattttgctacgtactactgtcaacaggatctttatcctccttatacgttcggccaagggaccaaggtggaaatcaaacgg

SEQ ID NO: 1340 - DNA, 324 bp, Homo sapiens
gacatccagatgacccagtccccatcctccctgtctgcatctgtaggagaccgtgtcaccatcacttgccgggcaggtcagtggattgggccgtacttaaattggtaccagcagaaatcagggaaagcccctaagcccctgatttatatggggtcctatttgccaagtggggtcccatcacgtttcagtggcagtggatctgggacagatttcactctcaccatcaatagtctgcaacctgaagattttgctacgtactactgtcaacaggatctttatcctccttttacgttcggccaagggaccaaggtggaaatcaaatgg

SEQ ID NO: 1341 - DNA, 324 bp, Homo sapiens; identical to SEQ ID NO: 1339

SEQ ID NO: 1342 - DNA, 324 bp, Homo sapiens
gacatccagatgacccagtctccatcctccctgtctgcatctgttggagaccgtgtcaccatcacttgccgggcaagtcagtggattgggccgtatttaaattggtaccagcagaaaccagggaaagcccctaagctcctgatctatatggggtcctatttgcaaagtggggtcccatcacgtttcagtggcagtggatctgggacagatttcactctcaccatcagcagtctgcaacctgaagattttgctacgtactactgccaacaggatctttatcctccttatgcgttcggccaagggaccaaggtggaaatcaaacgg

SEQ ID NO: 1343 - DNA, 324 bp, Homo sapiens
gacatccagatgacccagtctccatcctccctgtctgcatctgtaggggaccgtgtcaccatcacttgccgggcaagtcagtggattgggccgtatttaaattggtaccagcagagaccagggagagcccctaagctcctgatctatatggggtcctatttgcaaagtggggtcccatcacgtttcagtggcagtagatctgggaaagatttcactctcaccatcagcagtccgcaacctgaagattttgctacgtactactgtcaacaggatctttatcctccttatacgttcggccaagggaccaaggtggaaatcaaacgg

SEQ ID NO: 1344 - DNA, 324 bp, Homo sapiens
gacatccagatgacccagtctccatcctccctgtctgcatctgtaggagaccgtgtcaccatcacttgccgggcaagtcagtggattgggccgtatttaaattggtaccagcagaaaccagggaaagcccctaagctcctgatctatatggggtcctatttgcaaagtggggtcccatcacgtttcagtggcagtggatctaggacggatttcaccctcaccataagcagtctgcaacctgaagattatgctacgtactactgtcaacaggatctttatcctccttatacgttcggccaagggaccaaggtggaaatcaaacgg

SEQ ID NO: 1345 - DNA, 324 bp, Homo sapiens
gacatccagatgacccagtctccatcctccccgtctgcatctgtaggagaccgtgtcaccatcacttgccgggcaagtcagtggattgggccgtatttaaattggtaccagcagagaccagggaaagcccctaagctcctgatctatatggggtcctatttgcaaagtggggtcccatcacgtttcagtggcagtgggtctgggacagatttcactctcaccatcagcagtctgcaacctgaagattttgctacgtactactgtcaacaggatctttatcctcctttcacgttcggccaagggaccaaggtggaaatcaaaagg

SEQ ID NO: 1346 - DNA, 324 bp, Homo sapiens
gacatccagatgacccagtctccatcctccctgtctgcatctgtaggagaccgtgtcaccatcacttgccgggcaagtcagtggattgggccgtatttaaattggtaccagcagaaaccagggaaagcccctaagctcctgatctatatggggtcctatttgcaaagtggggtcccatcacgtttcagtggcagtggatctgggacagatttcactctcaccatcagcagtctgcaacctgaagattttgctacgtactactgtcaacaggatctttatccgcctttcacgttcggccaagggaccaaggtggaaatcaaacgg

SEQ ID NO: 1347 - DNA, 321 bp, Homo sapiens
gacatccagatgacccagtctccatcctccctgtctgcatctgtaggaaaccgtgtcaccatcacttgccgggcaagtcagtggattgggccgtatttaaattggtaccagcagaaaccaggggaagcccctaaacccctgatctatatggggtcctatttgccaagtggggtcccatcacgtttcagtggcagtggatctgggacagatttcgctctcaccatcagcagtctgcaacctgaagatgttgctacgtactactgtcaacaggatctttatcctccgacgttcggccaagggaccaaggtggaaatcaaacgg

SEQ ID NO: 1348 - DNA, 324 bp, Homo sapiens
gacatccagatgacccagtctccatcctccccgtctgcatctgtaggagaccgtgtcaccatcacttgccgggcaagtcagtggattgggccgtatttaaattggtaccagcagaaaccagggaaagcccctaagctcctgatctatatggggtcctatttgcaaagtggggtcccatcacgtttcagtggcagtggatctgggacagatttcactctcaccatcagcagtctgcaacctgaagattttgctacgtactactgtcaacaggatctttatcctccttatacgttcggccaagggaccaaggtggaaatcaaacgg

SEQ ID NO: 1349 - DNA, 324 bp, Homo sapiens
gacatccagatgacccagtctccatcctccctgtctgcatctgtaggagaccgtgtcaccatcacttgccgggcaagtcagtggattgggccgtatttaaattggtaccagcagaaaccagggaaagcccctaagctcctgatctatatggggtcctatttgcaaagtggggtcccatcacgtttcagtggcagtggatctgggacagatttcactctcaccatcagcagtctgcaacctgaagattttgctatgtactactgtcaacaggatctttatcctccttatacgttcggccaagggaccaaggtggaaatcaaacgg

SEQ ID NO: 1350 - DNA, 321 bp, Homo sapiens
gacatccagatgacccagtctccatcctccctgtctgcatctgtaggagaccgtgtcaccatcacttgccgggcaactcagtggattgggccgtatttaaattggtaccagcagaaaccagggaaagcccctaagctcctgatctatatggggtcctatttgcaaagtggggtcccatcacgtttcagtggcagtggatctgggacagatttcactctcaccatcagcagtctgcaacctgaagattttgctacgtactactgtcaacaggatctttatcctccgacgttcggccaagggaccaaggtggaaatcaaacgg

SEQ ID NO: 1351 - DNA, 324 bp, Homo sapiens; identical to SEQ ID NO: 1335

SEQ ID NO: 1352 - DNA, 324 bp, Homo sapiens
gacatccagatgacccagtccccatcctccctgtctgcatctgtaggagaccgtgtcaccatcacttgccgggcaagtcagtggattgggccgtatttaaattggtaccagcagaaaccagggaaagcccctaagcccctgatctatatggggtcctatctgccaagtggggtcccatcacgtttcagtggcagtggatctgggacagatttcactctcaccatcagcagtctgcaacctgaagattttgctacgtactactgccaacaggatctttaccctcctttcacgttcggccaagggaccaaggtggaaatcaaacgg

SEQ ID NO: 1353 - DNA, 324 bp, Homo sapiens
gacatccagatgacccagtctccatcctccctgtctgcatctgtgggagaccgtgtcaccatcacttgccgggcaagtcagtggattgggccgtatttaaattggtaccagcagaaaccagggaaagcccctaagctcctgatctatatggggtcctatctgcaaagtggggtcccatcacgtttcagtggcagtagatctgggacagatttcactctcaccatcagcagtctgcaacctgaagattttgctacgtactactgtcaacaggatctttatcctccttatacgttcggccaagggaccaaggtggaaatcaaacgg

SEQ ID NO: 1354 - DNA, 324 bp, Homo sapiens
gacatccagatgacccagtctccatcctccctgtctgcatctgtaggagaccgtgtcaccatcacttgccgggcaagtcagtggattgggccgtatttaaattggtaccagcagaaaccagggaaagcccctaagctcctgatctatatggggtcctatctgccaagtggggtcccatcacgtttcagtggcagtggatctgggacagatttcactctcaccatcagcagtctgcaacctgaagattttgctacgtactactgtcaacaggatctttatcctccttatacgttcggccaagggaccaaggtggaaatcaaacgg

SEQ ID NO: 1355 - DNA, 324 bp, Homo sapiens; identical to SEQ ID NO: 1337

SEQ ID NO: 1356 - DNA, 324 bp, Homo sapiens
gacatccagatgacccagtctccatcctccctgtctgcatctgtaggagaccgtgtcaccatcacttgccgggcaagtcagtggattgggccgtatctaaattggtaccagcagaaaccagggaaagcccctaagcccctgatctatatggggtcctatctgccaagtggggtcccatcacgcttcagtggcagtggatctgggacagatttcactctcaccatcagcagtctgcaacctgaagattttgctacgtactactgtcaacaggatctgtatcctccttatacgttcggccaggggaccaaggtggaaatcaaacgg

SEQ ID NO: 1357 - DNA, 324 bp, Homo sapiens; identical to SEQ ID NO: 1334

SEQ ID NO: 1358 - DNA, 324 bp, Homo sapiens
gacatccagatgacccaatctccatcctccctgtctgcatctgcaggagtccgtgtcgccatcacttgccgggcaagtcagtggattgggccgtatttaaattggtaccagcagaaaccagggaaagcccctaagctcctgatctatatggggtcctatttgcgaagtggggtcccatcacgtttcagtggcagtggatctgggacagatttcactctcaccatcagtagtctgcaacctgaagattttgctacgtactactgtcaacaggatctttatcctccttatacgttcggccaagggaccaaggtggaaatcaaacgg

SEQ ID NO: 1359 - DNA, 324 bp, Homo sapiens
gacatccagatgacccagtctccatcctccctgtctgcatctgtaggagaccgcgtcaccgtcacttgccgggcaagtcagtggattgggccgtatttaaattggtaccagcagaaaccggggaaagcccctaagctcctgatctatatggggtcctatttgcacagtggggtcccatcacgtttcagtggcagtggatctgggacagatttcactctcaccatcagcagtctgcaacctgaagattttgctacgtactactgtcaacaggatctttatcctccttatacgttcggccaagggaccaaggtggaaatcaaacgg

SEQ ID NO: 1360 - DNA, 324 bp, Homo sapiens
gacatccagatgacccagtctccatcctccctgtctgcatctgtaggagaccgtgtcaccatcacttgccgggcaagtcagtggattgggccgtatttaaattggtaccagcagaaaccagggaaagcccctaagctcctgatctatatggggtcctatttgcaaagtggggtcccatcacgtttcagtggcagtggatctgggacagatttcactctcaccatcagcagtctgcaacctgaagattttgccacgtactactgtcaacaggatctttatcctcctttcacgttcggccaagggaccaaggtggaaatcaaacgg

SEQ ID NO: 1361 - DNA, 324 bp, Homo sapiens
gacatccagatgacccagtctccatcctccctgtctgcatctgtaggagaccgtgtcaccatcacttgccgggcaagtcagtggattgggccgtatttaaattggtaccaacagaaaccagggaaagcccctaagcccctgatctatatggggtcctggcgcccgagtggggtcccatcacgcttcagtggcagtggatctgggacagatttcactctcaccatcagcagtctgcaacctgaagattttgctacgtactactgtcaacaggatctttatcctccttttacgttcggccaagggaccaaggtggaaatcaaacgg

SEQ ID NO: 1362 - DNA, 324 bp, Homo sapiens
gacatccagatgacccagtctccatcctccctgtctgcatctgtaggagaccgtgtcaccatcacttgccgggcaagtcagtggattgggccgtatttaaattggtaccaacagaaaccagggaaagcccctaagcccctgatctatatggggtattgggcgccgagtggggtcccatcacgcttcagtggcagtggatctgggacagatttcactctcaccatcagcagtctgcaacctgaagattttgctacgtactactgtcaacaggatctttatcctccttttacgttcggccaagggaccaaggtggaaatcaaacgg

SEQ ID NO: 1363 - DNA, 324 bp, Homo sapiens
gacatccagataacccagtctccatcctccctgtctgcatctgtaggagaccgtgtcaccatcacttgccgggcaagtcagtggattgggccgtatttaaattggtaccagcagaaaccagggaaagcccctaagcccctgatctatatggggtcctatctcgcgcacggggtcccatcacgtttcagtggcagtggatctgggacggatttcactctcaccatcagcagtctgcaacctgaagattttgctacgtactactgtcaacaggatctttatcctccttatacgttcggccaagggaccaaggtggaaatcaaacgg

SEQ ID NO: 1364 - DNA, 324 bp, Homo sapiens
gacatccagatgacccagtctccatcctccctgtctgcatctgtaggagaccgtgtcaccatcacttgccgggcaagtcagtggattgggccgtatttaaattggtaccagcagaaaccggggaaagcccctaagcccctgatctatatggggtcctatcacgggaccggggtcccatcacgtttcagtggcagtggatctgggacagatttcactctcaccatcagcagtctgcaacctgaagattatgctacgtactactgtcaacaggatctttatcctccttatacgttcggccaagggaccaaggtggaaatcaaacgg

SEQ ID NO: 1365 - DNA, 324 bp, Homo sapiens
gacatccagatgacccagtctccatcctccctgtctgcatctgtaggagaccgtgtcaccatcacttgccgggcaagtcagtggattgggccgtatttaaattggtaccagcagaaaccagggaaagcccctaagcccctgatttatatggggtcctataggccgttgggggtcccatcacgtttcagtggcagtggatctgggacagatttcactctcaccatcagcagtctgcaacctgaagattttgctacgtactactgtcaacaggatctttatcctccttatacgttcggccaagggaccaaggtggaaatcaaacgg

SEQ ID NO: 1366 - DNA, 324 bp, Homo sapiens
gacatccagatgacccagtctccatcctccctgtctgcatctgtaggagaccgtgtcaccatcacttgccgggcaagtcagtggattgggccgtatttaaattggtaccagcagaaaccagggaaagcccctaagcccctgatctatatggggtcctatcgccccgcgggggtcccatcacgtttcagtggcagtggatctgggacagatttcactctcaccatcagcagtctgcaacctgaagattttgctacgtactactgtcaacaggatctttatcctccttatacgttcggccaagggaccaaggtggaaatcaaacgg

SEQ ID NO: 1367 - DNA, 324 bp, Homo sapiens
gacatccagatgacccagtctccatcctccctgtctgcatctgtaggagaccgtgtcaccatcacttgccgggcaagtcagtggattgggccgtatttaaattggtaccagcagaaaccagggaaagcccctaagcccctgatctatatggggtcctatagggcgcagggggtcccatcacgtttcagtggcagtggatctgggacagatttcactctcaccatcagcagtctgcaacctgaagattttgctacgtactactgtcaacaggatctttatcctccttatacgttcggccaagggaccaaggtggaaatcaaacgg

SEQ ID NO: 1368 - DNA, 324 bp, Homo sapiens
gacatccagatgacccagtctccatcctccctgtctgcatctgtaggagaccgtgtcaccatcacttgccgggcaagtcagtggattgggccgtatttaaattggtaccagcagaaaccagggaaagcccctaagcccctgatctatatggggtcctatttcgcctcgggggtcccatcacgtttcagtggcagtggatctgggacaaatttcactctcaccatcagcagtctgcaacctgaagattttgctacgtactactgtcaacaggatctttatcctccttatacgttcggccaagggaccaaggtggaaatcaaacgg

SEQ ID NO: 1369 - DNA, 324 bp, Homo sapiens
gacatccagatgacccagtctccatcctccctgtctgcatctgtaggagaccgtgtcaccatcacttgccgggcaagtcagtggattgggccgtatttaaattggtaccagcagaaaccagggaaagcccctaagctcctgatctatatggggtcctattggtggtccggggtcccatcacgtttcagtggcagtggatctgggacagatttcactctcaccatcagcagtctgcaacctgaagattttgctacgtactactgtcaacaggatctttatcctccttatacgttcggccaagggaccaaggtggaaatcaaacgg

SEQ ID NO: 1370 - DNA, 324 bp, Homo sapiens
gacatccagatgacccagtctccatcctccctgtctgcatctgtaggagaccgtgtcaccatcacttgccgggcaagtcagtggattgggccgtatttaaattggtaccagcagaaaccagggaaagcccctaagctcctgatctatatggggtcctatttgcaaagtggggtcccatcacgtttcagtggcagtggatctgggacagatttcactctcaccatcagcagtctgcaacctgaagattttgctacgtactactgtcaacaggatctttatatgcctgcggagttcggccaagggaccaaggtggaaatcaaacgg

SEQ ID NO: 1371 - DNA, 324 bp, Homo sapiens
gacatccagatgacccagtctccatcctccctgtctgcatctgtaggagaccgtgtcaccatcacttgccgggcaagtcagtggattgggccgtatttaaattggtaccagcagaaaccagggaaagcccctaagctcctgatctatatggggtcctatttgcaaagtggggtcccatcacgtttcagtggcagtggatctgggacagatttcactctcaccatcagcagtctgcaacctgaagattttgctacgtactactgtcaacaggatctttatgagcctctcaacttcggccaagggaccaaggtggaaatcaaacgg

SEQ ID NO: 1372 - DNA, 324 bp, Homo sapiens
gacatccagatgacccagtctccatcctccctgtctgcatctgtaggagaccgtgtcaccatcacttgccgggcaagtcagtggattgggccgtatttaaattggtaccagcagaaaccagggaaagcccctaagctcctgacctatatggggtcctatttgcaaagtggggtcccatcacgtttcagtggcagtggatctgggacagatttcactctcaccatcagcagtctgcaacctgaagatttcgctacgtactactgtcaacaggatctttatatgccttcggagttcggccaagggaccaaggtggaaatcaaacgg

SEQ ID NO: 1373 - DNA, 324 bp, Homo sapiens
gacatccagatgacccagtctccatcctccctgtctgcatctgtaggagaccgtgtcaccatcacttgccgggcaagtcagtggattgggccgtatttaaattggtaccagcagaaaccagggaaagcccctaagctcctgatctatatggggtcctatttgcaaagtggggtcccatcacgtttcagtggcagtggatctgggacagatttcactctcaccatcagcagtctgcaacctgaagattttgctacgtactactgtcaacaggatctttatatgcctgtggagttcggccaagggaccaaggtggaaatcaaacgg

SEQ ID NO: 1374 - DNA, 324 bp, Homo sapiens
gacatccagatgacccagtctccatcctccctgtctgcatctgtaggagaccgtgtcaccatcacttgccgggcaagtcagtggattgggccgtatttaaattggtaccagcagaaaccagggaaagcccctaagctcctgatctatatggggtcctatttgcaaagtggggtcccatcacgtttcagtggcagtggatctgggacagatttcactctcaccatcagcagtctgcaacctgaagattttgctacgtactactgtcaacaggatctttatgggcctggggagttcggccaagggaccaaggtggaaatcaaacgg

SEQ ID NO: 1375 - DNA, 324 bp, Homo sapiens
gacatccagatgacccagtctccatcctccctgtctgcatccgtaggagaccgtgtcaccatcacttgccgggcaagtcagtggattgggccgtatttaaattggtaccagcagaaaccagggaaagcccctaagctcctgatctatatggggtcctatttgcaaagtggggtcccatcacgtttcagtggcagtggatctgggacagatttcactctcaccatcagcagtctgcaacctgaagattttgctacgtactactgtcaacaggatctttatttgcctttcaccttcggccaagggaccaaggtggaaatcaaacgg

SEQ ID NO: 1376 - DNA, 324 bp, Homo sapiens
gacatccagataacccagtctccatcctccctgtctgcatctgtaggagaccgtgtcaccatcacttgccgggcaagtcagtggattgggccgtatttaaattggtaccagcagaaaccagggaaagcccctaagctcctgatctatatggggtcctatttgcaaagtggggtcccatcacgtttcagtggcagtggatctgggacagatttcactctcaccatcagcagtctgcaacctgaagattttgctacgtactactgtcaacaggatctttatgcgccttggaagttcggccaagggaccaaggtggaaatcaaacgg

SEQ ID NO: 1377 - DNA, 324 bp, Homo sapiens
gacatccagatgacccagtctccatcctccctgtctgcatctgtaggagaccgtgtcaccatcacttgccgggcagaccagtggattgggccgtatttaaattggtaccagcagaaaccagggaaagcccctaagctcctgatctatatggggtcctatttgcaaagtggggtcccatcacgtttcagtggcagtggatctgggacagatttcactctcaccatcagcagtctgcaacctgaagattttgctacgtactactgtcaacaggatctttatcctccttatacgttcggccaagggaccaaggtggaaatcaaacgg

SEQ ID NO: 1378 - DNA, 324 bp, Homo sapiens
gacatccagatgacccagtctccatcctccctgtctgcatctgtaggagaccgtgtcaccatcacttgccgggcaacccagtggattgggccgtatttaaattggtaccagcagaaaccagggaaagcccctaagctcctgatctatatggggtcctatttgcaaagtggggtcccatcacgtttcagtggcagtggatctgggacagatttcactctcaccatcagcagtctgcaacctgaagattttgctacgtactactgccaacaggatctttatcctccttatacgttcggccaagggaccaaggtggaaatcaaacgg

SEQ ID NO: 1379 - DNA, 324 bp, Homo sapiens
gacatccagatgacccagtctccatcctccctgtctgcatctgtaggagaccgtgtcaccatcacttgccgggcaaaccagtggattgggccgtatttaaattggtaccagcagaaaccagggaaagcccctaagctcctgatctatatggggtcctatttgcaaagtggggtcccatcacgtttcagtggcagtggatctgggacagatttcactctcaccatcagcagtctgcaacctgaagattttgctacgtactactgtcaacaggatctttatcctccttatacgttcggccaagggaccaaggtggaaatcaaacgg

SEQ ID NO: 1380 - DNA, 324 bp, Homo sapiens
gacatccagatgacccagtctccatcctccctgtctgcatctgtaggagaccgtgtcaccatcacttgccgggcaagtcagtggattgggccgtatttaaattggtaccagcagaaaccagggaaagcccctaagctcctgatctatatggggtcctatttggccagtggggtcccatcacgtttcagtggcagtggatctgggacagatttcactctcaccatcagcagtctgcaacctgaagattttgctacgtactactgtcaacaggatctttatcctccttatacgttcggccaagggaccgaggtggaaatcaaacgg

SEQ ID NO: 1381 - DNA, 324 bp, Homo sapiens
gacatccagatgacccagtctccatcctccctgtctgcatctgtaggagaccgtgtcaccatcacttgccgggcaagtcagtggattgggccgtatttaaattggtaccagcagaaaccagggaaagcccctaagctcctgatctatatggggtcctatttgtggagtggggtcccatcacgtttcagtggcagtggatctgggacagatttcactctcaccatcagcagtctgcaacctgaagattttgctacgtactactgtcaacaggatctttatcctccttatacgttcggccaagggaccaaggtggaaatcaaacgg

SEQ ID NO: 1382 - DNA, 324 bp, Homo sapiens
gacatccagatgacccagtctccatcctccctgtctgcatctgtaggagaccgtgtcaccatcacttgccgggcaagtcagtggattgggccgtatttaaattggtaccagcagaaaccagggaaagcccctaagctcctgatctatatggggtcctatttggtgagtggggtcccatcacgtttcagtggcagtggatctgggacagatttcactctcaccatcagcagtctgcaacctgaagattttgctacgtactactgtcaacaggatctttatcctccttatacgttcggccaagggaccaaggtggaaatcaaacgg

SEQ ID NO: 1383 - DNA, 324 bp, Homo sapiens
gacatccagatgacccagtctccatcctccctgtctgcatctgtaggagaccgtgtcaccatcacttgccgggcaagtcagtggattgggccgtatttaaattggtaccagcagaaaccagggaaagcccctaagctcctgatctatatggggtcctatttgccgagtggggtcccatcacgtttcagtggcagtggatctgggacagatttcactctcaccatcagcagtctgcaacctgaagattttgctacgtactactgtcaacaggatctttatcctccttatacgttcggccaagggaccaaggtggaaatcaaacgg

SEQ ID NO: 1384 - DNA, 324 bp, Homo sapiens
gacatccagatgacccagtctccatcctccctgtctgcatctgtaggagaccgtgtcaccatcacttgccgggcaagtcagtggattgggccgtatttaaattggtaccagcagaaaccagggaaagcccctaagctcctgatctatatggggtcctatttgtccagtggggtcccatcacgtttcagtggcagtggatctgggacagatttcactctcaccatcagcagtctgcaacctgaagattttgctacgtactactgtcaacaggatctttatcctccttatacgttcggccaagggaccaaggtggaaatcaaacgg

SEQ ID NO: 1385 - DNA, 324 bp, Homo sapiens
gacatccagatgacccagtctccatcctccctgtctgcatctgtaggagaccgtgtcaccatcacttgccgggcaagtcagtggattgggccgtatttaaattggtaccaacagaaaccagggaaagcccctaagcccctgatctatatggggtattgggcgccgagtggggtcccatcacgcttcagtggcagtggatctgggacagatttcactctcaccatcagcagtctgcaacctgaagattttgctacgtactactgtcaacaggatctttatatgcctgcggagttcggccaagggaccaaggtggaaatcaaacgg

SEQ ID NO: 1386 - DNA, 324 bp, Homo sapiens
gacatccagatgacccagtctccatcctccctgtctgcatctgtaggagaccgtgtcaccatcacttgccgggcaagtcagtggattgggccgtatttaaattggtaccaacagaaaccagggaaagcccctaagcccctgatctatatggggtattgggcgccgagtggggtcccatcacgcttcagtggcagtggatctgggacagatttcactctcaccatcagcagtctgcaacctgaagattttgctacgtactactgtcaacaggatctttatgagcctctcaacttcggccaagggaccaaggtggaaatcaaacgg

SEQ ID NO: 1387 - DNA, 324 bp, Homo sapiens
gacatccagatgacccagtctccatcctccctgtctgcatctgtaggagaccgtgtcaccatcacttgccgggcaagtcagtggattgggccgtatttaaattggtaccaacagaaaccagggaaagcccctaagcccctgatctatatggggtattgggcgccgagtggggtcccatcacgcttcagtggcagtggatctgggacagatttcactctcaccatcagcagtctgcaacctgaagattttgctacgtactactgtcaacaggatctttatatgccttcggagttcggccaagggaccaaggtggaaatcaaacgg

SEQ ID NO: 1388 - DNA, 324 bp, Homo sapiens
gacatccagatgacccagtctccatcctccctgtctgcatctgtaggagaccgtgtcaccatcacttgccgggcaagtcagtggattgggccgtatttaaattggtaccaacagaaaccagggaaagcccctaagcccctgatctatatggggtattgggcgccgagtggggtcccatcacgcttcagtggcagtggatctgggacagatttcactctcaccatcagcagtctgcaacctgaagattttgctacgtactactgtcaacaggatctttatatgcctgtggagttcggccaagggaccaaggtggaaatcaaacgg

SEQ ID NO: 1389 - DNA, 324 bp, Homo sapiens
gacatccagatgacccagtctccatcctccctgtctgcatctgtaggagaccgtgtcaccatcacttgccgggcaagtcagtggattgggccgtatttaaattggtaccaacagaaaccagggaaagcccctaagcccctgatctatatggggtattgggcgccgagtggggtcccatcacgcttcagtggcagtggatctgggacagatttcactctcaccatcagcagtctgcaacctgaagattttgctacgtactactgtcaacaggatctttatgggcctggggagttcggccaagggaccaaggtggaaatcaaacgg

SEQ ID NO: 1390 - DNA, 324 bp, Homo sapiens
gacatccagatgacccagtctccatcctccctgtctgcatctgtaggagaccgtgtcaccatcacttgccgggcaagtcagtggattgggccgtatttaaattggtaccaacagaaaccagggaaagcccctaagcccctgatctatatggggtattgggcgccgagtggggtcccatcacgcttcagtggcagtggatctgggacagatttcactctcaccatcagcagtctgcaacctgaagattttgctacgtactactgtcaacaggatctttatttgcctttcatgttcggccaagggaccaaggtggaaatcaaacgg

SEQ ID NO: 1391 - DNA, 324 bp, Homo sapiens
gacatccagatgacccagtctccatcctccctgtctgcatctgtaggagaccgtgtcaccatcacttgccgggcaagtcagtggattgggccgtatttaaattggtaccaacagaaaccagggaaagcccctaagcccctgatctatatggggtattgggcgccgagtggggtcccatcacgcttcagtggcagtggatctgggacagatttcactctcaccatcagcagtctgcaacctgaagattttgctacgtactactgtcaacaggatctttatgcgccttggaagttcggccaagggaccaaggtggaaatcaaacgg

SEQ ID NO: 1392 - DNA, 324 bp, Homo sapiens
gacatccagataacccagtctccatcctccctgtctgcatctgtaggagaccgtgtcaccatcacttgccgggcaagtcagtggattgggccgtatttaaattggtaccagcagaaaccagggaaagcccctaagcccctgatctatatggggtcctatctcgcgcacggggtcccatcacgtttcagtggcagtggatctgggacggatttcactctcaccatcagcagtctgcaacctgaagattttgctacgtactactgtcaacaggatctttatatgcctgcggagttcggccaagggaccaaggtggaaatcaaacgg

SEQ ID NO: 1393 - DNA, 324 bp, Homo sapiens
gacatccagataacccagtctccatcctccctgtctgcatctgtaggagaccgtgtcaccatcacttgccgggcaagtcagtggattgggccgtatttaaattggtaccagcagaaaccagggaaagcccctaagcccctgatctatatggggtcctatctcgcgcacggggtcccatcacgtttcagtggcagtggatctgggacggatttcactctcaccatcagcagtctgcaacctgaagattttgctacgtactactgtcaacaggatctttatgagcctctcaacttcggccaagggaccaaggtggaaatcaaacgg

SEQ ID NO: 1394 - DNA, 324 bp, Homo sapiens
gacatccagataacccagtctccatcctccctgtctgcatctgtaggagaccgtgtcaccatcacttgccgggcaagtcagtggattgggccgtatttaaattggtaccagcagaaaccagggaaagcccctaagcccctgatctatatggggtcctatctcgcgcacggggtcccatcacgtttcagtggcagtggatctgggacggatttcactctcaccatcagcagtctgcaacctgaagattttgctacgtactactgtcaacaggatctttatatgccttcggagttcggccaagggaccaaggtggaaatcaaacgg

SEQ ID NO: 1395 - DNA, 324 bp, Homo sapiens
gacatccagataacccagtctccatcctccctgtctgcatctgtaggagaccgtgtcaccatcacttgccgggcaagtcagtggattgggccgtatttaaattggtaccagcagaaaccagggaaagcccctaagcccctgatctatatggggtcctatctcgcgcacggggtcccatcacgtttcagtggcagtggatctgggacggatttcactctcaccatcagcagtctgcaacctgaagattttgctacgtactactgtcaacaggatctttatatgcctgtggagttcggccaagggaccaaggtggaaatcaaacgg

SEQ ID NO: 1396 - DNA, 324 bp, Homo sapiens
gacatccagataacccagtctccatcctccctgtctgcatctgtaggagaccgtgtcaccatcacttgccgggcaagtcagtggattgggccgtatttaaattggtaccagcagaaaccagggaaagcccctaagcccctgatctatatggggtcctatctcgcgcacggggtcccatcacgtttcagtggcagtggatctgggacggatttcactctcaccatcagcagtctgcaacctgaagattttgctacgtactactgtcaacaggatctttatgggcctggggagttcggccaagggaccaaggtggaaatcaaacgg

SEQ ID NO: 1397 - DNA, 324 bp, Homo sapiens
gacatccagataacccagtctccatcctccctgtctgcatctgtaggagaccgtgtcaccatcacttgccgggcaagtcagtggattgggccgtatttaaattggtaccagcagaaaccagggaaagcccctaagcccctgatctatatggggtcctatctcgcgcacggggtcccatcacgtttcagtggcagtggatctgggacggatttcactctcaccatcagcagtctgcaacctgaagattttgctacgtactactgtcaacaggatctttatttgcctttcatgttcggccaagggaccaaggtggaaatcaaacgg

SEQ ID NO: 1398 - DNA, 324 bp, Homo sapiens
gacatccagataacccagtctccatcctccctgtctgcatctgtaggagaccgtgtcaccatcacttgccgggcaagtcagtggattgggccgtatttaaattggtaccagcagaaaccagggaaagcccctaagcccctgatctatatggggtcctatctcgcgcacggggtcccatcacgtttcagtggcagtggatctgggacggatttcactctcaccatcagcagtctgcaacctgaagattttgctacgtactactgtcaacaggatctttatgcgccttggaagttcggccaagggaccaaggtggaaatcaaacgg

SEQ ID NO: 1399 - DNA, 324 bp, Homo sapiens
gacatccagatgacccagtctccatcctccctgtctgcatctgtaggagaccgtgtcaccatcacttgccgggcaagtcagtggattgggccgtatttaaattggtaccagcagaaaccggggaaagcccctaagcccctgatctatatggggtcctatcacgggaccggggtcccatcacgtttcagtggcagtggatctgggacagatttcactctcaccatcagcagtctgcaacctgaagattatgctacgtactactgtcaacaggatctttatatgcctgcggagttcggccaagggaccaaggtggaaatcaaacgg

SEQ ID NO: 1400 - DNA, 324 bp, Homo sapiens
gacatccagatgacccagtctccatcctccctgtctgcatctgtaggagaccgtgtcaccatcacttgccgggcaagtcagtggattgggccgtatttaaattggtaccagcagaaaccggggaaagcccctaagcccctgatctatatggggtcctatcacgggaccggggtcccatcacgtttcagtggcagtggatctgggacagatttcactctcaccatcagcagtctgcaacctgaagattatgctacgtactactgtcaacaggatctttatgagcctctcaacttcggccaagggaccaaggtggaaatcaaacgg

SEQ ID NO: 1401 - DNA, 324 bp, Homo sapiens
gacatccagatgacccagtctccatcctccctgtctgcatctgtaggagaccgtgtcaccatcacttgccgggcaagtcagtggattgggccgtatttaaattggtaccagcagaaaccggggaaagcccctaagcccctgatctatatggggtcctatcacgggaccggggtcccatcacgtttcagtggcagtggatctgggacagatttcactctcaccatcagcagtctgcaacctgaagattatgctacgtactactgtcaacaggatctttatatgccttcggagttcggccaagggaccaaggtggaaatcaaacgg

SEQ ID NO: 1402 - DNA, 324 bp, Homo sapiens
gacatccagatgacccagtctccatcctccctgtctgcatctgtaggagaccgtgtcaccatcacttgccgggcaagtcagtggattgggccgtatttaaattggtaccagcagaaaccggggaaagcccctaagcccctgatctatatggggtcctatcacgggaccggggtcccatcacgtttcagtggcagtggatctgggacagatttcactctcaccatcagcagtctgcaacctgaagattatgctacgtactactgtcaacaggatctttatatgcctgtggagttcggccaagggaccaaggtggaaatcaaacgg

SEQ ID NO: 1403 - DNA, 324 bp, Homo sapiens
gacatccagatgacccagtctccatcctccctgtctgcatctgtaggagaccgtgtcaccatcacttgccgggcaagtcagtggattgggccgtatttaaattggtaccagcagaaaccggggaaagcccctaagcccctgatctatatggggtcctatcacgggaccggggtcccatcacgtttcagtggcagtggatctgggacagatttcactctcaccatcagcagtctgcaacctgaagattatgctacgtactactgtcaacaggatctttatgggcctggggagttcggccaagggaccaaggtggaaatcaaacgg

SEQ ID NO: 1404 - DNA, 324 bp, Homo sapiens
gacatccagatgacccagtctccatcctccctgtctgcatctgtaggagaccgtgtcaccatcacttgccgggcaagtcagtggattgggccgtatttaaattggtaccagcagaaaccggggaaagcccctaagcccctgatctatatggggtcctatcacgggaccggggtcccatcacgtttcagtggcagtggatctgggacagatttcactctcaccatcagcagtctgcaacctgaagattatgctacgtactactgtcaacaggatctttatttgcctttcatgttcggccaagggaccaaggtggaaatcaaacgg

SEQ ID NO: 1405 - DNA, 324 bp, Homo sapiens
gacatccagatgacccagtctccatcctccctgtctgcatctgtaggagaccgtgtcaccatcacttgccgggcaagtcagtggattgggccgtatttaaattggtaccagcagaaaccggggaaagcccctaagcccctgatctatatggggtcctatcacgggaccggggtcccatcacgtttcagtggcagtggatctgggacagatttcactctcaccatcagcagtctgcaacctgaagattatgctacgtactactgtcaacaggatctttatgcgccttggaagttcggccaagggaccaaggtggaaatcaaacgg

SEQ ID NO: 1406 - DNA, 324 bp, Homo sapiens
gacatccagatgacccagtctccatcctccctgtctgcatctgtaggagaccgtgtcaccatcacttgccgggcaagtcagtggattgggccgtatttaaattggtaccagcagaaaccagggaaagcccctaagcccctgatttatatggggtcctataggccgttgggggtcccatcacgtttcagtggcagtggatctgggacagatttcactctcaccatcagcagtctgcaacctgaagattttgctacgtactactgtcaacaggatctttatatgcctgcggagttcggccaagggaccaaggtggaaatcaaacgg

SEQ ID NO: 1407 - DNA, 324 bp, Homo sapiens
gacatccagatgacccagtctccatcctccctgtctgcatctgtaggagaccgtgtcaccatcacttgccgggcaagtcagtggattgggccgtatttaaattggtaccagcagaaaccagggaaagcccctaagcccctgatttatatggggtcctataggccgttgggggtcccatcacgtttcagtggcagtggatctgggacagatttcactctcaccatcagcagtctgcaacctgaagattttgctacgtactactgtcaacaggatctttatgagcctctcaacttcggccaagggaccaaggtggaaatcaaacgg

SEQ ID NO: 1408 - DNA, 324 bp, Homo sapiens
gacatccagatgacccagtctccatcctccctgtctgcatctgtaggagaccgtgtcaccatcacttgccgggcaagtcagtggattgggccgtatttaaattggtaccagcagaaaccagggaaagcccctaagcccctgatttatatggggtcctataggccgttgggggtcccatcacgtttcagtggcagtggatctgggacagatttcactctcaccatcagcagtctgcaacctgaagattttgctacgtactactgtcaacaggatctttatatgccttcggagttcggccaagggaccaaggtggaaatcaaacgg

SEQ ID NO: 1409 - DNA, 324 bp, Homo sapiens
gacatccagatgacccagtctccatcctccctgtctgcatctgtaggagaccgtgtcaccatcacttgccgggcaagtcagtggattgggccgtatttaaattggtaccagcagaaaccagggaaagcccctaagcccctgatttatatggggtcctataggccgttgggggtcccatcacgtttcagtggcagtggatctgggacagatttcactctcaccatcagcagtctgcaacctgaagattttgctacgtactactgtcaacaggatctttatatgcctgtggagttcggccaagggaccaaggtggaaatcaaacgg

SEQ ID NO: 1410 - DNA, 324 bp, Homo sapiens
gacatccagatgacccagtctccatcctccctgtctgcatctgtaggagaccgtgtcaccatcacttgccgggcaagtcagtggattgggccgtatttaaattggtaccagcagaaaccagggaaagcccctaagcccctgatttatatggggtcctataggccgttgggggtcccatcacgtttcagtggcagtggatctgggacagatttcactctcaccatcagcagtctgcaacctgaagattttgctacgtactactgtcaacaggatctttatgggcctggggagttcggccaagggaccaaggtggaaatcaaacgg

SEQ ID NO: 1411 - DNA, 324 bp, Homo sapiens
gacatccagatgacccagtctccatcctccctgtctgcatctgtaggagaccgtgtcaccatcacttgccgggcaagtcagtggattgggccgtatttaaattggtaccagcagaaaccagggaaagcccctaagcccctgatttatatggggtcctataggccgttgggggtcccatcacgtttcagtggcagtggatctgggacagatttcactctcaccatcagcagtctgcaacctgaagattttgctacgtactactgtcaacaggatctttatttgcctttcatgttcggccaagggaccaaggtggaaatcaaacgg

SEQ ID NO: 1412 - DNA, 324 bp, Homo sapiens
gacatccagatgacccagtctccatcctccctgtctgcatctgtaggagaccgtgtcaccatcacttgccgggcaagtcagtggattgggccgtatttaaattggtaccagcagaaaccagggaaagcccctaagcccctgatttatatggggtcctataggccgttgggggtcccatcacgtttcagtggcagtggatctgggacagatttcactctcaccatcagcagtctgcaacctgaagattttgctacgtactactgtcaacaggatctttatgcgccttggaagttcggccaagggaccaaggtggaaatcaaacgg

SEQ ID NO: 1413 - DNA, 324 bp, Homo sapiens
gacatccagatgacccagtctccatcctccctgtctgcatctgtaggagaccgtgtcaccatcacttgccgggcaagtcagtggattgggccgtatttaaattggtaccagcagaaaccagggaaagcccctaagcccctgatctatatggggtcctatagggcgcagggggtcccatcacgtttcagtggcagtggatctgggacagatttcactctcaccatcagcagtctgcaacctgaagattttgctacgtactactgtcaacaggatctttatatgcctgcggagttcggccaagggaccaaggtggaaatcaaacgg

SEQ ID NO: 1414 - DNA, 324 bp, Homo sapiens
gacatccagatgacccagtctccatcctccctgtctgcatctgtaggagaccgtgtcaccatcacttgccgggcaagtcagtggattgggccgtatttaaattggtaccagcagaaaccagggaaagcccctaagcccctgatctatatggggtcctatagggcgcagggggtcccatcacgtttcagtggcagtggatctgggacagatttcactctcaccatcagcagtctgcaacctgaagattttgctacgtactactgtcaacaggatctttatgagcctctcaacttcggccaagggaccaaggtggaaatcaaacgg

SEQ ID NO: 1415 - DNA, 324 bp, Homo sapiens
gacatccagatgacccagtctccatcctccctgtctgcatctgtaggagaccgtgtcaccatcacttgccgggcaagtcagtggattgggccgtatttaaattggtaccagcagaaaccagggaaagcccctaagcccctgatctatatggggtcctatagggcgcagggggtcccatcacgtttcagtggcagtggatctgggacagatttcactctcaccatcagcagtctgcaacctgaagattttgctacgtactactgtcaacaggatctttatatgccttcggagttcggccaagggaccaaggtggaaatcaaacgg

SEQ ID NO: 1416 - DNA, 324 bp, Homo sapiens
gacatccagatgacccagtctccatcctccctgtctgcatctgtaggagaccgtgtcaccatcacttgccgggcaagtcagtggattgggccgtatttaaattggtaccagcagaaaccagggaaagcccctaagcccctgatctatatggggtcctatagggcgcagggggtcccatcacgtttcagtggcagtggatctgggacagatttcactctcaccatcagcagtctgcaacctgaagattttgctacgtactactgtcaacaggatctttatatgcctgtggagttcggccaagggaccaaggtggaaatcaaacgg

SEQ ID NO: 1417 - DNA, 324 bp, Homo sapiens
gacatccagatgacccagtctccatcctccctgtctgcatctgtaggagaccgtgtcaccatcacttgccgggcaagtcagtggattgggccgtatttaaattggtaccagcagaaaccagggaaagcccctaagcccctgatctatatggggtcctatagggcgcagggggtcccatcacgtttcagtggcagtggatctgggacagatttcactctcaccatcagcagtctgcaacctgaagattttgctacgtactactgtcaacaggatctttatgggcctggggagttcggccaagggaccaaggtggaaatcaaacgg

SEQ ID NO: 1418 - DNA, 324 bp, Homo sapiens
gacatccagatgacccagtctccatcctccctgtctgcatctgtaggagaccgtgtcaccatcacttgccgggcaagtcagtggattgggccgtatttaaattggtaccagcagaaaccagggaaagcccctaagcccctgatctatatggggtcctatagggcgcagggggtcccatcacgtttcagtggcagtggatctgggacagatttcactctcaccatcagcagtctgcaacctgaagattttgctacgtactactgtcaacaggatctttatttgcctttcatgttcggccaagggaccaaggtggaaatcaaacgg

SEQ ID NO: 1419 - DNA, 324 bp, Homo sapiens
gacatccagatgacccagtctccatcctccctgtctgcatctgtaggagaccgtgtcaccatcacttgccgggcaagtcagtggattgggccgtatttaaattggtaccagcagaaaccagggaaagcccctaagcccctgatctatatggggtcctatagggcgcagggggtcccatcacgtttcagtggcagtggatctgggacagatttcactctcaccatcagcagtctgcaacctgaagattttgctacgtactactgtcaacaggatctttatgcgccttggaagttcggccaagggaccaaggtggaaatcaaacgg

SEQ ID NO: 1420 - DNA, 324 bp, Homo sapiens
gacatccagatgacccagtctccatcctccctgtctgcatctgtaggagaccgtgtcaccatcacttgccgggcaagtcagtggattgggccgtatttaaattggtaccagcagaaaccagggaaagcccctaagcccctgatctatatggggtcctatttcgcctcgggggtcccatcacgtttcagtggcagtggatctgggacaaatttcactctcaccatcagcagtctgcaacctgaagattttgctacgtactactgtcaacaggatctttatatgcctgcggagttcggccaagggaccaaggtggaaatcaaacgg

SEQ ID NO: 1421 - DNA, 324 bp, Homo sapiens
gacatccagatgacccagtctccatcctccctgtctgcatctgtaggagaccgtgtcaccatcacttgccgggcaagtcagtggattgggccgtatttaaattggtaccagcagaaaccagggaaagcccctaagcccctgatctatatggggtcctatttcgcctcgggggtcccatcacgtttcagtggcagtggatctgggacaaatttcactctcaccatcagcagtctgcaacctgaagattttgctacgtactactgtcaacaggatctttatgagcctctcaacttcggccaagggaccaaggtggaaatcaaacgg

SEQ ID NO: 1422 - DNA, 324 bp, Homo sapiens
gacatccagatgacccagtctccatcctccctgtctgcatctgtaggagaccgtgtcaccatcacttgccgggcaagtcagtggattgggccgtatttaaattggtaccagcagaaaccagggaaagcccctaagcccctgatctatatggggtcctatttcgcctcgggggtcccatcacgtttcagtggcagtggatctgggacaaatttcactctcaccatcagcagtctgcaacctgaagattttgctacgtactactgtcaacaggatctttatatgccttcggagttcggccaagggaccaaggtggaaatcaaacgg

SEQ ID NO: 1423 - DNA, 324 bp, Homo sapiens
gacatccagatgacccagtctccatcctccctgtctgcatctgtaggagaccgtgtcaccatcacttgccgggcaagtcagtggattgggccgtatttaaattggtaccagcagaaaccagggaaagcccctaagcccctgatctatatggggtcctatttcgcctcgggggtcccatcacgtttcagtggcagtggatctgggacaaatttcactctcaccatcagcagtctgcaacctgaagattttgctacgtactactgtcaacaggatctttatatgcctgtggagttcggccaagggaccaaggtggaaatcaaacgg

SEQ ID NO: 1424 - DNA, 324 bp, Homo sapiens
gacatccagatgacccagtctccatcctccctgtctgcatctgtaggagaccgtgtcaccatcacttgccgggcaagtcagtggattgggccgtatttaaattggtaccagcagaaaccagggaaagcccctaagcccctgatctatatggggtcctatttcgcctcgggggtcccatcacgtttcagtggcagtggatctgggacaaatttcactctcaccatcagcagtctgcaacctgaagattttgctacgtactactgtcaacaggatctttatgggcctggggagttcggccaagggaccaaggtggaaatcaaacgg

SEQ ID NO: 1425 - DNA, 324 bp, Homo sapiens
gacatccagatgacccagtctccatcctccctgtctgcatctgtaggagaccgtgtcaccatcacttgccgggcaagtcagtggattgggccgtatttaaattggtaccagcagaaaccagggaaagcccctaagcccctgatctatatggggtcctatttcgcctcgggggtcccatcacgtttcagtggcagtggatctgggacaaatttcactctcaccatcagcagtctgcaacctgaagattttgctacgtactactgtcaacaggatctttatttgcctttcatgttcggccaagggaccaaggtggaaatcaaacgg

SEQ ID NO: 1426 - DNA, 324 bp, Homo sapiens
gacatccagatgacccagtctccatcctccctgtctgcatctgtaggagaccgtgtcaccatcacttgccgggcaagtcagtggattgggccgtatttaaattggtaccagcagaaaccagggaaagcccctaagcccctgatctatatggggtcctatttcgcctcgggggtcccatcacgtttcagtggcagtggatctgggacaaatttcactctcaccatcagcagtctgcaacctgaagattttgctacgtactactgtcaacaggatctttatgcgccttggaagttcggccaagggaccaaggtggaaatcaaacgg

SEQ ID NO: 1427 - DNA, 324 bp, Homo sapiens
gacatccagatgacccagtctccatcctccctgtctgcatctgtaggagaccgtgtcaccatcacttgccgggcaagtcagtggattgggccgtatttaaattggtaccagcagaaaccagggaaagcccctaagctcctgatctatatggggtcctattggtggtccggggtcccatcacgtttcagtggcagtggatctgggacagatttcactctcaccatcagcagtctgcaacctgaagattttgctacgtactactgtcaacaggatctttatatgcctgcggagttcggccaagggaccaaggtggaaatcaaacgg

SEQ ID NO: 1428 - DNA, 324 bp, Homo sapiens
gacatccagatgacccagtctccatcctccctgtctgcatctgtaggagaccgtgtcaccatcacttgccgggcaagtcagtggattgggccgtatttaaattggtaccagcagaaaccagggaaagcccctaagctcctgatctatatggggtcctattggtggtccggggtcccatcacgtttcagtggcagtggatctgggacagatttcactctcaccatcagcagtctgcaacctgaagattttgctacgtactactgtcaacaggatctttatgagcctctcaacttcggccaagggaccaaggtggaaatcaaacgg

SEQ ID NO: 1429 - DNA, 324 bp, Homo sapiens
gacatccagatgacccagtctccatcctccctgtctgcatctgtaggagaccgtgtcaccatcacttgccgggcaagtcagtggattgggccgtatttaaattggtaccagcagaaaccagggaaagcccctaagctcctgatctatatggggtcctattggtggtccggggtcccatcacgtttcagtggcagtggatctgggacagatttcactctcaccatcagcagtctgcaacctgaagattttgctacgtactactgtcaacaggatctttatatgccttcggagttcggccaagggaccaaggtggaaatcaaacgg

SEQ ID NO: 1430 - DNA, 324 bp, Homo sapiens
gacatccagatgacccagtctccatcctccctgtctgcatctgtaggagaccgtgtcaccatcacttgccgggcaagtcagtggattgggccgtatttaaattggtaccagcagaaaccagggaaagcccctaagctcctgatctatatggggtcctattggtggtccggggtcccatcacgtttcagtggcagtggatctgggacagatttcactctcaccatcagcagtctgcaacctgaagattttgctacgtactactgtcaacaggatctttatatgcctgtggagttcggccaagggaccaaggtggaaatcaaacgg

SEQ ID NO: 1431 - DNA, 324 bp, Homo sapiens
gacatccagatgacccagtctccatcctccctgtctgcatctgtaggagaccgtgtcaccatcacttgccgggcaagtcagtggattgggccgtatttaaattggtaccagcagaaaccagggaaagcccctaagctcctgatctatatggggtcctattggtggtccggggtcccatcacgtttcagtggcagtggatctgggacagatttcactctcaccatcagcagtctgcaacctgaagattttgctacgtactactgtcaacaggatctttatgggcctggggagttcggccaagggaccaaggtggaaatcaaacgg

SEQ ID NO: 1432 - DNA, 324 bp, Homo sapiens
gacatccagatgacccagtctccatcctccctgtctgcatctgtaggagaccgtgtcaccatcacttgccgggcaagtcagtggattgggccgtatttaaattggtaccagcagaaaccagggaaagcccctaagctcctgatctatatggggtcctattggtggtccggggtcccatcacgtttcagtggcagtggatctgggacagatttcactctcaccatcagcagtctgcaacctgaagattttgctacgtactactgtcaacaggatctttatttgcctttcatgttcggccaagggaccaaggtggaaatcaaacgg

SEQ ID NO: 1433 - DNA, 324 bp, Homo sapiens
gacatccagatgacccagtctccatcctccctgtctgcatctgtaggagaccgtgtcaccatcacttgccgggcaagtcagtggattgggccgtatttaaattggtaccagcagaaaccagggaaagcccctaagctcctgatctatatggggtcctattggtggtccggggtcccatcacgtttcagtggcagtggatctgggacagatttcactctcaccatcagcagtctgcaacctgaagattttgctacgtactactgtcaacaggatctttatgcgccttggaagttcggccaagggaccaaggtggaaatcaaacgg

SEQ ID NO: 1434 - DNA, 321 bp, Homo sapiens
gacatccagatgacccagtctccatcctccctgtctgcatctgtaggagaccgtgtcaccatcacttgccgggcaagtcagtggattgggccgtatttaaattggtaccagcagaaaccagggaaagcccctaagctcctgatctatatggggtcctatttgcaaagtggggtcccatcacgtttcagtggcagtggatctgggacggatttcactctcaccatcagcagtctgcaacctgaagattttgctacgtactactgtcaacaggatctttatgccccccagttcggccaagggaccaaggtggaaatcaaacgg

SEQ ID NO: 1435 - DNA, 324 bp, Homo sapiens
gacatccagatgacccagtctccatcctccctgtctgcatctgtaggagaccgtgtcaccatcacttgccgggcaagtcagtggattgggccgtatttaaattggtaccagcagaaaccagggaaagcccctaagctcctgatctatatggggtcctattccggctccggggtcccatcaaggttcagtggcagtggatctgggacagatttcactctcaccatcagcagtctgcaacctgaagattttgctacgtactactgtcaacaggatctttatgagcctctcaacttcggccaagggaccaaggtggaaatcaaacgg

SEQ ID NO: 1436 - DNA, 324 bp, Homo sapiens
gacatccagatgacccagtctccatcctccctgtctgcatctgtaggagaccgtgtcaccatcacttgccgggcaagtcagtggattgggccgtacagcaactggtaccagcagaaaccagggaaagcccctaagctcctgatctatatggggtcctatttgcaaagtggggtcccatcacgtttcagtggcagtggatctgggacagatttcactctcaccatcagcagtctgcaacctgaagattttgctacgtactactgtcaacaggatctttatcctccttatacgttcggccaagggaccaaggtggaaatcaaacgg

SEQ ID NO: 1437 - DNA, 324 bp, Homo sapiens
gacatccagatgacccagtctccatcctccctgtctgcatctgtaggagaccgtgtcaccatcacttgccgggcaagtcagtggattgggccgtacaacaactggtaccagcagaaaccagggaaagcccctaagctcctgatctatatggggtcctatttgcaaagtggggtcccatcacgtttcagtggcagtggatctgggacagatttcactctcaccatcagcagtctgcaacctgaagattttgctacgtactactgtcaacaggatctttatcctccttatacgttcggccaagggaccaaggtggaaatcaaacgg

SEQ ID NO: 1438 - DNA, 324 bp, Homo sapiens
gacatccagatgacccagtctccatcctccctgtctgcatctgtaggagaccgtgtcaccatcacttgccgggcaacccagtggattgggccgtatttaaattggtaccaacagaaaccagggaaagcccctaagcccctgatctatatggggtcctatctgccaagtggggtcccatcacgcttcagtggcagtggatctgggacagatttcactctcaccatcagcagtctgcaacctgaagattttgctacgtactactgtcaacaggatctttatcctccttttacgttcggccaagggaccaaggtggaaatcaaacgg

SEQ ID NO: 1439 - DNA, 324 bp, Homo sapiens
gacatccagatgacccagtctccatcctccctgtctgcatctgtaggagaccgtgtcaccatcacttgccgggcaacccagtggattgggccgtatttaaattggtaccaacagaaaccagggaaagcccctaagcccctgatctatatggggtattgggcgccgagtggggtcccatcacgcttcagtggcagtggatctgggacagatttcactctcaccatcagcagtctgcaacctgaagattttgctacgtactactgtcaacaggatctttatcctccttttacgttcggccaagggaccaaggtggaaatcaaacgg

SEQ ID NO: 1440 - DNA, 324 bp, Homo sapiens
gacatccagatgacccagtctccatcctccctgtctgcatctgtaggagaccgtgtcaccatcacttgccgggcaagtcagtggattgggccgtatttaaattggtaccaacagaaaccagggaaagcccctaagcccctgatctatgtggggtattgggcgccgagtggggtcccatcacgcttcagtggcagtggatctgggacagatttcactctcaccatcagcagtctgcaacctgaagattttgctacgtactactgtcaacaggatctttatcctccttttacgttcggccaagggaccaaggtggaaatcaaacgg

SEQ ID NO: 1441 - DNA, 324 bp, Homo sapiens
gacatccagatgacccagtctccatcctccctgtctgcatctgtaggagaccgtgtcaccatcacttgccgggcaagtcagtggattgggccgtatttaaattggtaccaacagaaaccagggaaagcccctaagcccctgatctatatggggtcctatctgccaagtggggtcccatcacgcttcagtggcagtggatctgggacagatttcactctcaccatcagcagtctgcaacctgaagattttgctacgtactactgtcaacaggatctttatttaccttttacgttcggccaagggaccaaggtggaaatcaaacgg

SEQ ID NO: 1442 - DNA, 324 bp, Homo sapiens
gacatccagatgacccagtctccatcctccctgtctgcatctgtaggagaccgtgtcaccatcacttgccgggcaagtcagtggattgggccgtatttaaattggtaccaacagaaaccagggaaagcccctaagcccctgatctatatggggtattgggcgccgagtggggtcccatcacgcttcagtggcagtggatctgggacagatttcactctcaccatcagcagtctgcaacctgaagattttgctacgtactactgtcaacaggatctttatttaccttttacgttcggccaagggaccaaggtggaaatcaaacgg

SEQ ID NO: 1443 - DNA, 324 bp, Homo sapiens
gacatccagatgacccagtctccatcctccctgtctgcatctgtaggagaccgtgtcaccatcacttgccgggcaacccagtggattgggccgtatttaaattggtaccaacagaaaccagggaaagcccctaagcccctgatctatatggggtcctatctgccaagtggggtcccatcacgcttcagtggcagtggatctgggacagatttcactctcaccatcagcagtctgcaacctgaagattttgctacgtactactgtcaacaggatctttatttaccttttacgttcggccaagggaccaaggtggaaatcaaacgg

SEQ ID NO: 1444 - DNA, 324 bp, Homo sapiens
gacatccagatgacccagtctccatcctccctgtctgcatctgtaggagaccgtgtcaccatcacttgccgggcaagtcagtggattgggccgtatttaaattggtaccaacagaaaccagggaaagcccctaagcccctgatctatgtggggtcctatctgccaagtggggtcccatcacgcttcagtggcagtggatctgggacagatttcactctcaccatcagcagtctgcaacctgaagattttgctacgtactactgtcaacaggatctttatcctccttttacgttcggccaagggaccaaggtggaaatcaaacgg

SEQ ID NO: 1445 - DNA, 324 bp, Homo sapiens
gacatccagatgacccagtctccatcctccctgtctgcatctgtaggagaccgtgtcaccatcacttgccgggcaacccagtggattgggccgtatttaaattggtaccaacagaaaccagggaaagcccctaagcccctgatctatgtggggtcctatctgccaagtggggtcccatcacgcttcagtggcagtggatctgggacagatttcactctcaccatcagcagtctgcaacctgaagattttgctacgtactactgtcaacaggatctttatcctccttttacgttcggccaagggaccaaggtggaaatcaaacgg

SEQ ID NO: 1446 - DNA, 324 bp, Homo sapiens
gacatccagatgacccagtctccatcctccctgtctgcatctgtaggagaccgtgtcaccatcacttgccgggcaagtcagtggattgggccgtataacaattggtaccaacagaaaccagggaaagcccctaagcccctgatctatatggggtcctatctgccaagtggggtcccatcacgcttcagtggcagtggatctgggacagatttcactctcaccatcagcagtctgcaacctgaagattttgctacgtactactgtcaacaggatctttatcctccttttacgttcggccaagggaccaaggtggaaatcaaacgg

SEQ ID NO: 1447 - DNA, 324 bp, Homo sapiens
gacatccagatgacccagtctccatcctccctgtctgcatctgtaggagaccgtgtcaccatcacttgccgggcaagtcagtggattgggccgtataacaattggtaccaacagaaaccagggaaagcccctaagcccctgatctatatggggtattgggcgccgagtggggtcccatcacgcttcagtggcagtggatctgggacagatttcactctcaccatcagcagtctgcaacctgaagattttgctacgtactactgtcaacaggatctttatcctccttttacgttcggccaagggaccaaggtggaaatcaaacgg

SEQ ID NO: 1448 - DNA, 324 bp, Homo sapiens
gacatccagatgacccagtctccatcctccctgtctgcatctgtaggagaccgtgtcaccatcacttgccgggcaacccagtggattgggccgtataacaattggtaccagcagaaaccagggaaagcccctaagcccctgatctatatggggtcctatctgccaagtggggtcccatcacgcttcagtggcagtggatctgggacagatttcactctcaccatcagcagtctgcaacctgaagattttgctacgtactactgtcaacaggatctttatcctccttttacgttcggccaagggaccaaggtggaaatcaaacgg

SEQ ID NO: 1449 - DNA, 324 bp, Homo sapiens
gacatccagatgacccagtctccatcctccctgtctgcatctgtaggagaccgtgtcaccatcacttgccgggcaagtcagtggattgggccgtatagcaattggtaccaacagaaaccagggaaagcccctaagcccctgatctatatggggtcctatctgccaagtggggtcccatcacgcttcagtggcagtggatctgggacagatttcactctcaccatcagcagtctgcaacctgaagattttgctacgtactactgtcaacaggatctttatcctccttttacgttcggccaagggaccaaggtggaaatcaaacgg

SEQ ID NO: 1450 - DNA, 324 bp, Homo sapiens
  unsure 95: n = unknown
gacatccagatgacccagtctccatcctccctgtctgcatctgtaggagaccgtgtcaccatcacttgccgggcaagtcagtggattgggccgtntagcaattggtaccaacagaaaccagggaaagcccctaagcccctgatctatatggggtattgggcgccgagtggggtcccatcacgcttcagtggcagtggatctgggacagatttcactctcaccatcagcagtctgcaacctgaagattttgctacgtactactgtcaacaggatctttatcctccttttacgttcggccaagggaccaaggtggaaatcaaacgg

SEQ ID NO: 1451 - DNA, 324 bp, Homo sapiens
gacatccagatgacccagtctccatcctccctgtctgcatctgtaggagaccgtgtcaccatcacttgccgggcaacccagtggattgggccgtatagcaattggtaccaacagaaaccagggaaagcccctaagcccctgatctatatggggtcctatctgccaagtggggtcccatcacgcttcagtggcagtggatctgggacagatttcactctcaccatcagcagtctgcaacctgaagattttgctacgtactactgtcaacaggatctttatcctccttttacgttcggccaagggaccaaggtggaaatcaaacgg

SEQ ID NO: 1452 - DNA, 324 bp, Homo sapiens; identical to SEQ ID NO: 425

SEQ ID NO: 1453 - DNA, 324 bp, Homo sapiens; identical to SEQ ID NO: 426

SEQ ID NO: 1454 - DNA, 324 bp, Homo sapiens; identical to SEQ ID NO: 427

SEQ ID NO: 1455 - DNA, 324 bp, Homo sapiens; identical to SEQ ID NO: 428

SEQ ID NO: 1456 - DNA, 324 bp, Homo sapiens; identical to SEQ ID NO: 429

SEQ ID NO: 1457 - DNA, 324 bp, Homo sapiens; identical to SEQ ID NO: 430

SEQ ID NO: 1458 - DNA, 324 bp, Homo sapiens
gacatccagatgacccagtctccatcctccctgtctgcatctgtaggagaccgtgtcaccatcacttgccgggcaagtcagtggattgggccgtatttaaattggtaccaacagaaaccagggaaagcccctaagcccctgatctatatggggtattgggcgccgagtggggtcccatcacgcttcagtggcagtggatctgggacagatttcactctcaccatcagcagtctgcaacctgaagattttgctacgtactactgtcaacaggatggcagggccccttttacgttcggccaagggaccaaggtggaaatcaaacgg

SEQ ID NO: 1459 - DNA, 324 bp, Homo sapiens
gacatccagatgacccagtctccatcctccctgtctgcatctgtaggagaccgtgtcaccatcacttgccgggcaagtcagtggattgggccgtatttaaattggtaccaacagaaaccagggaaagcccctaagcccctgatctatatggggtcctatctgccaagtggggtcccatcacgcttcagtggcagtggatctgggacagatttcactctcaccatcagcagtctgcaacctgaagattttgctacgtactactgtcaacaggacttgtggcctccttttacgttcggccaagggaccaaggtggaaatcaaacgg

SEQ ID NO: 1460 - DNA, 324 bp, Homo sapiens
gacatccagatgacccagtctccatcctccctgtctgcatctgtaggagaccgtgtcaccatcacttgccgggcaagtcagtggattgggccgtatttaaattggtaccaacagaaaccagggaaagcccctaagcccctgatctatatggggtcctatctgccaagtggggtcccatcacgcttcagtggcagtggatctgggacagatttcactctcaccatcagcagtctgcaacctgaagattttgctacgtactactgtcaacaggatctcttccccccttttacgttcggccaagggaccaaggtggaaatcaaacgg

SEQ ID NO: 1461 - DNA, 324 bp, Homo sapiens
gacatccagatgacccagtctccatcctccctgtctgcatctgtaggagaccgtgtcaccatcacttgccgggcaagtcggtggattgggccgtatttaaattggtaccaacagaaaccagggaaagcccctaagcccctgatctatatggggtcctatctgccaagtggggtcccatcacgcttcagtggcagtggatctgggacagatttcactctcaccatcagcagtctgcaacctgaagattttgctacgtactactgtcaacaggacgtcttccctccttttacgttcggccaagggaccaaggtggaaatcaaacgg

SEQ ID NO: 1462 - DNA, 324 bp, Homo sapiens
gacatccagatgacccagtctccatcctccctgtctgcatctgtaggagaccgtgtcaccatcacttgccgggcaagtcagtggattgggccgtatttaaattggtaccaacagaaaccagggaaagcccctaagcccctgatctatatggggtcctatctgccaagtggggtcccatcacgcttcagtggcagtggatctgggacagatttcactctcaccatcagcagtctgcaacctgaagattttgctacgtactactgtcaacaggatgggtgggccccttttacgttcggccaagggaccaaggtggaaatcaaacgg

SEQ ID NO: 1463 - DNA, 324 bp, Homo sapiens
gacatccagatgacccagtctccatcctccctgtctgcatctgtaggagaccgtgtcaccatcacttgccgggcaagtcagtggattgggccgtatttaaattggtaccaacagaaaccagggaaagcccctaagcccctgatctatatggggtcctatctgccaagtggggtcccatcacgcttcagtggcagtggatctgggacagatttcactctcaccatcagcagtctgcaacctgaagattttgctacgtactactgtcaacaggacgtctcccctccttttacgttcggccaagggaccaaggtggaaatcaaacgg

SEQ ID NO: 1464 - DNA, 324 bp, Homo sapiens
gacatccagatgacccagtctccatcctccctgtctgcatctgtaggagaccgtgtcaccatcacttgccgggcaagtcagtggattgggccgtatttaaattggtaccaacagaaaccagggaaagcccctaagcccctgatctatatggggtcctatctgccaagtggggtcccatcacgcttcagtggcagtggatctgggacagatttcactctcaccatcagcagtctgcaacctgaagattttgctacgtactactgtcaacaggacatgtcccctccttttacgttcggccaagggaccaaggtggaaatcaaacgg

SEQ ID NO: 1465 - DNA, 324 bp, Homo sapiens
gacatccagatgacccagtctccatcctccctgtctgcatctgtaggagaccgtgtcaccatcacttgccgggcaagtcagtggattgggccgtatttaaattggtaccaacagaaaccagggaaagcccctaagcccctgatctatatggggtcctatctgccaagtggggtcccatcacgcttcagtggcagtggatctgggacagatttcactctcaccatcagcagtctgcaacctgaagattttgctacgtactactgtcaacaggatctgctccccccttttacgttcggccaagggaccaaggtggaaatcaaacgg

SEQ ID NO: 1466 - DNA, 324 bp, Homo sapiens
gacatccagatgacccagtctccatcctccctgtctgcatctgtaggagaccgtgtcaccatcacttgccgggcaagtcagtggattgggccgtatttaaattggtaccaacagaaaccagggaaagcccctaagcccctgatctatatggggtcctatctgccaagtggggtcccatcacgcttcagtggcagtggatctgggacagatttcactctcaccatcagcagtctgcaacctgaagatttcgctacgtactactgtcaacaggatttgttcgtcccttttacgttcggccaagggaccaaggtggaaatcaaacgg

SEQ ID NO: 1467 - DNA, 324 bp, Homo sapiens
gacatccagatgacccagtctccatcctccctgtctgcatctgtaggagaccgtgtcaccatcacttgccgggcaagtcagtggattgggccgtatttaaattggtaccaacagaaaccagggaaagcccctaagcccctgatctatatggggtcctatctgccaagtggggtcccatcacgcttcagtggcagtggatctgggacagatttcactctcaccatcagcagtctgcaacctgaagattttgctacgtactactgtcaacaggatctggtcccgccttttacgttcggccaagggaccaaggtggaaatcaaacgg

SEQ ID NO: 1468 - DNA, 324 bp, Homo sapiens; identical to SEQ ID NO: 1467

SEQ ID NO: 1469 - DNA, 324 bp, Homo sapiens
gacatccagatgacccagtctccatcctccctgtctgcatctgtaggagaccgtgtcaccatcacttgccgggcaagtcagtggattgggccgtatttaaattggtaccaacagaaaccagggaaagcccctaagcccctgatctatatggggtcctatctgccaagtggggtcccatcacgcttcagtggcagtggatctgggacagatttcactctcaccatcagcagtctgcaacctgaagattttgctacgtactactgtcaacaggatctttatccgcctttcttcttcggccaagggaccaaggtggaaatcaaacgg

SEQ ID NO: 1470 - DNA, 324 bp, Homo sapiens
gacatccagatgacccagtctccatcctccctgtctgcatctgtaggagaccgtgtcaccatcacttgccgggcaagtcagtggattgggccgtatttaaattggtaccaacagaaaccagggaaagcccctaagcccctgatctatatggggtcctatctgccgagtggggtcccatcacgcttcagtggcagtggatctgggacagatttcactctcaccatcagcagtctgcaacctgaagattttgctacgtactactgtcaacaggatttttatcctccttttacgttcggccaagggaccaaggtggaaatcaaacgg

SEQ ID NO: 1471 - DNA, 324 bp, Homo sapiens
gacatccagatgacccagtctccatcctccctgtctgcatctgtaggagaccgtgtcaccatcacttgccgggcaagtcagtggattgggccgtatttaaattggtaccaacagaaaccagggaaagcccctaagcccctgatctatatggggtcctatctgccaagtggggtcccatcacgcttcagtggcagtggatctgggacagatttcactctcaccatcagcagtctgcaacctgaagattttgctacgtactactgtcaacaggatctcctccccccttttacgttcggccaagggaccaaggtggaaatcaaacgg

SEQ ID NO: 1472 - DNA, 324 bp, Homo sapiens
gacatccagatgacccagtctccatcctccctgtctgcatctgtaggagaccgtgtcaccatcacttgccgggcaagtcagtggattgggccgtatttaaattggtaccaacaggaaccagggaaagcccctaagcccctgatctatatggggtcctatctgccaagtggggtcccatcacgcttcagtggcagtggatctgggacagatttcactctcaccatcagcagtctgcaacctgaagattttgctacgtactactgtcaacaggatgcctcccccccttttacgttcggccaagggaccaaggtggaaatcaaacgg

SEQ ID NO: 1473 - DNA, 324 bp, Homo sapiens
gacatccagatgacccagtctccatcctccctgtctgcatctgtaggagaccgtgtcaccatcacttgccgggcaagtcagtggattgggccgtatttaaattggtaccaacagaaaccagggaaagcccctaagcccctgatctatatggggtcctatctgccaagtggggtcccatcacgcttcagtggcagtggatctgggacagatttcactctcaccatcagcagtctgcaacctgaagattttgctacgtactactgtcagcaggacgtgtaccctccttttacgttcggccaagggaccaaggtggaaatcaaacgg

SEQ ID NO: 1474 - DNA, 324 bp, Homo sapiens
gacatccagatgacccagtctccatcctccctgtctgcatctgtaggagaccgtgtcaccatcacttgccgggcaagtcagtggattgggccgtatttaaattggtaccaacagaaaccagggaaagcccctaagcccctgatctatatggggtcctatctgccaaatggggtcccatcacgcttcagtggcagtggatctgggacagatttcactctcaccatcagcagtctgcaacctgaagattttgctacgtactactgtcaacaggatctgatccccccttttacgttcggccaggggaccaaggtggaaatcaaacgg

SEQ ID NO: 1475 - DNA, 324 bp, Homo sapiens
gacatccagatgacccagtctccatcctccctgtccgcatctgtaggagaccgtgtcaccatcacttgccgggcaagtcagtggattgggccgtatttaaattggtaccaacagaaaccagggaaagcccctaagcccctgatctatatggggtcctatctgccaagtggggtcccatcacgcttcagtggcagtggatctgggacagatttcactctcaccatcagcagtctgcaacctgaagattttgctacgtactactgtcaacaggatatctacccgccttttacgttcggccaagggaccaaggtggaaatcaaacgg

SEQ ID NO: 1476 - DNA, 324 bp, Homo sapiens
gacatccagatgacccagtctccatcctccctgtctgcatctgtaggagaccgtgtcaccatcacttgccgggcaagtcagtggattgggccgtatttaaattggtaccaacagaagccagggaaagcccctaagcccctgatctatatggggtcctatctgccaagtggggtcccatcacgcttcagtggcagtggatctgggacagatttcactctcaccatcagcagtctgcaacctgaagattttgctacgtactactgtcaacaggatctgttgagcccttttacgttcggccaagggaccaaggtggaaatcaaacgg

SEQ ID NO: 1477 - DNA, 324 bp, Homo sapiens
gacatccagatgacccagtctccatcctccctgtctgcatctgtaggagaccgtgtcaccatcacttgccgggcaagtcagtggattgggccgtatttaaattggtaccaacagaaaccagggaaagcccctaagcccctgatctatatggggtattgggcgccgagtggggtcccatcacgcttcagtggcagtggatctgggacagatttcactctcaccatcagcagtctgcaacctgaagattttgctacgtactactgtcaacaggatgtcttcttcccttttacgttcggccaagggaccaaggtggaaatcaaacgg

SEQ ID NO: 1478 - DNA, 324 bp, Homo sapiens
gacatccagatgacccagtctccatcctccctgtctgcatctgtaggggaccgtgtcaccatcacttgccgggcaagtcagtggattgggccgtatttaaattggtaccaacagaaaccagggaaagcccctaagcccctgatttatatggggtattgggcgccgagtggggtcccatcacgcttcagtggcagtggatctgggacagatttcactctcaccatcagcagtctgcaacctgaagattttgctacgtactactgtcaacaggatttgttcgtcccttttacgttcggccaagggaccaaggtggaaatcaaacgg

SEQ ID NO: 1479 - DNA, 324 bp, Homo sapiens
gacatccagatgacccagtctccatcctccctgtctgcatctgtaggagaccgtgtcaccatcacttgccgggcaagtcagtggattgggccgtatttaaattggtaccaacagaaaccagggaaagcccctaagcccctgatctatatggggtattgggcgccgagtggggtcccatcacgcttcagtggcagtggatctgggacagatttcactctcaccatcagcagtctgcaacctgaagattttgctacgtactactgtcaacaggatctcttcttcccttttacgttcggccaagggaccaaggtggaaatcaaacgg

SEQ ID NO: 1480 - DNA, 324 bp, Homo sapiens
gacatccagatgacccagtctccatcctccctgtctgcatctgtaggagaccgtgtcaccatcacttgccgggcaagtcagtggattgggccgtatttaaattggtaccaacagaaaccagggaaagcccctaagcccctgatctatatggggtattgggcgccgagtggggtcccatcacgcttcagtggcagtggatctgggacagatttcactctcaccatcagcagtctgcaacctgaagattttgctacgtactactgtcaacaggatgtcgtccccccttttacgttcggccaagggaccaaggtggaaatcaaacgg

SEQ ID NO: 1481 - DNA, 324 bp, Homo sapiens
gacatccagatgacccagtctccatcctccctgtctgcatctgtaggagaccgtgtcaccatcacttgccgggcaagtcagtggattgggccgtatttaaattggtaccaacagaaaccagggaaagcccctaagcccctgatctatatggggtattgggcgccgagtggggtcccatcacgcttcagtggcagtggatctgggacagatttcactctcaccatcagcagtctgcaacctgaagattttgctacgtactactgtcaacaggatatgttccccccttttacgttcggccaagggaccaaggtggaaatcaaacgg

SEQ ID NO: 1482 - DNA, 324 bp, Homo sapiens
gacatccagatgacccagtctccatcctccctgtctgcatctgtaggagaccgtgtcaccatcacttgccgggcaagtcagtggattgggccgtatttaaattggtaccaacagaaaccagggaaagcccctaagcccctgatctatatggggtattgggcgccgagtggggccccatcacgcttcagtggcagtggatctgggacagatttcactctcaccatcagcagtctgcaacctgaagattttgctacgtactactgtcaacaggatttctacccgccttttacgttcggccaagggaccaaggtggaaatcaaacgg

SEQ ID NO: 1483 - DNA, 324 bp, Homo sapiens
gacatccagatgacccagtctccatcctccctgtctgcatctgtaggagaccgtgtcaccatcacttgccgggcaagtcagtggattgggccgtatttaaattggtaccaacagaaaccagggaaagcccctaagcccctgatctatatggggtattgggcgccgagtggggtcccatcacgcttcagtggcagtggatctgggacagatttcactctcaccatcagcagtctgcaacctgaagattttgctacgtactactgtcaacaggatatcctccccccttttacgttcggccaagggaccaaggtggaaatcaaacga

SEQ ID NO: 1484 - DNA, 324 bp, Homo sapiens
gacatccagatgacccagtctccatcctccctgtctgcatctgtaggagaccgtgtcaccatcacttgccgggcaagtcagtggattgggccgtatttaaattggtaccaacagaaaccagggaaagcccctaagcccctgatctatatggggtattgggcgccgagtggggtcccatcacgcttcagtggcagtggatctgggacagatttcactctcaccatcagcagtctgcaacctgaagattttgctacgtactactgtcaacaggatgtcctccccccttttacgttcggccaagggaccaaggtggaaatcaaacgg

SEQ ID NO: 1485 - DNA, 324 bp, Homo sapiens
gacatccagatgacccagtctccatcctccctgtctgcatctgtaggagaccgtgtcaccatcacttgccgggcaagtcagtggattgggccgtatttaaattggtaccaacagaaaccagggaaagcccctaagcccctgatctatatggggtattgggcgccgagtggggtcccatcacgcttcagtggcagtggatctgggacagatttcactctcaccatcagcagtctgcaacctgaagattttgctacgtactactgtcaacaggatctctacttcccttttacgttcggccaagggaccaaggtggaaatcaaacgg

SEQ ID NO: 1486 - DNA, 324 bp, Homo sapiens
gacatccagatgacccagtctccatcctccctgtctgcatctgtaggagaccgtgtcaccatcacttgccgggcaagtcagtggattgggccgtatttaaattggtaccaacagaaaccagggaaagcccctaagcccctgatctatatggggtattgggcgccgagtggggtcccatcacgcttcagtggcagtggatctgggacagatttcactctcaccatcagcagtctgcaacctgaagattttgctacgtactactgtcaacaggatctcctccccccttttacgttcggccaagggaccaaggtggaaatcaaacgg

SEQ ID NO: 1487 - DNA, 323 bp, Homo sapiens
gacatccagatgacccagtctccatcctccctgtctgcatctgtaggagaccgtgtcaccatcacttgccgggcaagtcagtggattgggccgtatttaaattggtaccaacagaaaccagggaaagcccctaagcccctgatctatatggggtattgggcgccgagtggggtcccatcacgcttcagtggcagtggatctgggacagatttcactctcaccatcagcagtctgcaacctgaagattttgctacgtactactgtcaacaggatctggtgccccctttacgttcggccaagggaccaaggtggaaatcaagcgg

SEQ ID NO: 1488 - DNA, 324 bp, Homo sapiens
gacatccagatgacccagtctccatcctccctgtctgcatctgtaggagaccgtgtcaccatcacttgccgggcaagtcagtggattgggccgtatttaaattggtaccaacagaaaccagggaaagcccctaagcccctgatctatatggggtattgggcgccgggtggggtcccatcacgcttcagtggcagtggatctgggacagatttcactctcaccatcggcagtctgcaacctgaagattttgctacgtactactgtcaacaggatgtcacgcccccttttacgttcggccaagggaccaaggtggaaatcaaacgg

SEQ ID NO: 1489 - DNA, 324 bp, Homo sapiens
gacatccagatgacccagtctccatcctccctgtctgcatctgtaggagaccgtgtcaccatcacttgccgggcaagtcagtggattgggccgtatttaaattggtaccaacagaaaccagggaaagcccctaagcccctgatctatatggggtattgggcgccgagtggggtcccatcacgcttcagtggcagtggatctgggacagatttcactctcaccatcagcagtctgcaacctgaagattttgctacgtactactgtcaacaggatgtctacccgccttttacgttcggccaagggaccaaggtggaaatcaaacgg

SEQ ID NO: 1490 - DNA, 324 bp, Homo sapiens
gacatccagatgacccagtctccatcctccctgtctgcatctgtaggagaccgtgtcaccatcacttgccgggcaagtcagtggattgggccgtatttaaattggtaccaacagaaaccagggaaagcccctaagcccctgatctatatggggtattgggcgccgagtggggtcccatcacgcttcagtggcagtggatctgggacagatttcactctcaccatcagcagtctgcaacctgaagattttgctacgtactactgtcaacaggatgtgttgtggccttttacgttcggccaagggaccaaggtggaaatcaaacgg

SEQ ID NO: 1491 - DNA, 324 bp, Homo sapiens
gacatccagatgacccagtctccatcctccctgtctgcatctgtaggagaccgtgtcaccatcacttgccgggcaagtcagtggattgggccgtatttaaattggtaccaacagaaaccagggaaagcccctaagcccctgatctatatggggtattgggcgccgagtggggtcccatcacgcttcagtggcagtggatctgggacagatttcactctcaccatcagcagtctgcaacctgaagattttgctacgtactactgtcaacaggatttctacttcccttttacgttcggccaagggaccaaggtggaaatcaaacgg

SEQ ID NO: 1492 - DNA, 324 bp, Homo sapiens
gacatccagatgacccagtctccatcctccctgtctgcatctgtaggagaccgtgtcaccatcacttgccgggcaagtcagtggattgggccgtatttaaattggtaccaacagaaaccagggaaagcccctaagcccctgatctatatggggtattgggcgccgagtggggtcccatcacgcttcagtggcagtggatctgggacagatttcactctcaccatcagcagtctgcaacctgaagattttgctacgtactactgtcaacaggatagctcccccccttttacgttcggccaagggaccaaggtggaaatcaaacgg

SEQ ID NO: 1493 - DNA, 324 bp, Homo sapiens
gacatccagatgacccagtctccatcctccctgtctgcatctgtaggagaccgtgtcaccatcacttgccgggcaagtcagtggattgggccgtatttaaattggtaccaacagaaaccagggaaagcccctaagcccctgatctatatggggtattgggcgccgagtggggtcccatcacgcttcagtggcagtggatctgggacagatttcactctcaccatcagcagtctgcaacctgaagattttgctacgtactactgtcaacaggatatctacccgccttttacgttcggccaagggaccaaggtggaaatcaaacgg

SEQ ID NO: 1494 - DNA, 324 bp, Homo sapiens
gacatccagatgacccagtctccatcctccctgcctgcatctgtaggagaccgtgtcaccatcacttgccgggcaagtcagtggattgggccgtatttaaattggtaccaacagaaaccagggaaagcccctaagcccctgatctatatggggtattgggcgccgagtggggtcccatcacgcttcagtggcagtggatctgggacagatttcactctcaccatcagcagtctgcaacctgaagattttgctacgtactactgtcaacaggatctgaaggccccttttacgttcggccaagggaccaaggtggaaatcaaacgg

SEQ ID NO: 1495 - DNA, 324 bp, Homo sapiens
gacatccagatgacccagtctccatcctccctgtctgcatctgtaggagaccgtgtcaccatcacttgccgggcaagtcagtggattgggccgtatttaaattggtaccaacagaaaccagggaaagcccctaagcccctgatctatatggggtattgggcgccgagtggggtcccatcacgcttcagtggcagtggatctgggacagatttcactctcaccatcagcagtctgcaacctgaagattttgctacgtactactgtcaacaggatcacctccccccttttacgttcggccaagggaccaaggtggaaatcaaacgg

SEQ ID NO: 1496 - DNA, 324 bp, Homo sapiens
gacatccagatgacccagtctccatcctccctgtctgcatctgtaggagaccgtgtcaccatcacttgccgggcaagtcagtggattgggccgtatttaaattggtaccaacagaaaccagggaaagcccctaagcccctgatctatatggggtattgggcgccgagtggggtcccatcacgcttcagtggcagtggatctgggacagatttcactctcaccatcagcagtctgcaacctgaagattttgctacgtactactgtcaacaggatttgttgccgccttttacgttcggccaagggaccaaggtggaaatcaaacgg

SEQ ID NO: 1497 - DNA, 324 bp, Homo sapiens
gacatccagatgacccagtctccatcctccctgtctgcatctgtaggagaccgtgtcaccatcacttgccgggcaagtcagtggattgggccgtatttaaattggtaccaacagaaaccagggaaagcccctaagcccctgatctatatggggtattgggcgccgagtggggtcccatcacgcttcagtggcagtggatctgggacagatttcactctcaccatcagcagtctgcaacctgaagattttgctacgtactactgtcaacaggatctcttccccccttttacgttcggccaagggaccaaggtggaaatcaaacgg

SEQ ID NO: 1498 - DNA, 324 bp, Homo sapiens
gacatccagatgacccagtctccatcctccctgtctgcatctgtaggagaccgtgtcaccatcacttgccgggcaagtcagtggattgggccgtatttaaattggtaccaacagaaaccagggaaagcccctaagcccctgatctatatggggtattgggcgccgagtggggtcccatcacgcttcagtggcagtggatctgggacagatttcactctcaccatcagcagtctgcaacctgaagattttgctacgtactactgtcaacaggatgtcttccccccttttacgttcggccaagggaccaaggtggaaatcaaacgg

SEQ ID NO: 1499 - DNA, 324 bp, Homo sapiens; identical to SEQ ID NO: 1472

SEQ ID NO: 1500 - DNA, 324 bp, Homo sapiens
gacatccagatgacccagtctccatcctccctgtctgcatctgtaggagaccgtgtcaccatcacttgccgggcaagtcagtggattgggccgtatttaaattggtaccaacagaaaccagggaaagcccctaagcccctgatctatatggggtattgggcgccgagtggggtcccatcacgcttcagtggcagtggatctgggacagatttcactctcaccatcagcagtctgcaacctgaagattttgctacgtactactgtcaacaggatgggggggagccttttacgttcggccaagggaccaaggtggaaatcaaacgg

SEQ ID NO: 1501 - DNA, 324 bp, Homo sapiens
gacatccagatgacccagtctccatcctccctgtctgcatctgtaggagaccgtgtcaccatcacttgccgggcaagtcagtggattgggccgtatttaaattggtaccagcagaaaccggggaaagcccctaagctcctgatctatatggggtactgggcccaaagtggggtcccatcacgtttcagtggcagtggatctgggacagatttcactctcaccatcagcagtctgcaacctgaagattttgctacgtactactgtcaacaggatctttatcctccttatacgttcggccaagggaccaaggtggaaatcaaacgg

SEQ ID NO: 1502 - DNA, 325 bp, Homo sapiens
gacatccagatgacccagtctccatcctccctgtctgcatctgtaggagaccgtgtcaccatcacttgccgggcaagtcagaatattgataattatttatattggtaccagcagaaaccagggaaggcccctaggctcctgatctatcgggcttcctatttgcaaagtggggtcccatcacgtttcagtggcagtggatctgggacagatttcactctcaccatcagcagtctgcaacctgaagattttgctacgtactactgtcaacagcttgctattctgcctattacgttcggccaagggaccaaggtggaaatcaaacggg

SEQ ID NO: 1503 - DNA, 325 bp, Homo sapiens
gacatccagatgacccagtctccatcctccctgtctgcatctgtaggagaccgtgtcaccatcacttgccgggcaagtcagacgattgattgggggttaaattggtaccagcagaaaccagggaaagcccctaagctcctgatctatactacttccagtttgcaaagtggggtcccatcacgtttcagtggcagtggatctgggacagatttcactctcaccatcagcagtctgcaacctgaagattttgctacgtactactgtcaacaggattcttggcatcctccgacgttcggccaagggaccaaggtggaaatcaaacggg

SEQ ID NO: 1504 - DNA, 327 bp, Homo sapiens
gacatccagatgacccagtctccatcctccctgtctgcatctgtaggagaccgtgtcaccatcacttgccgggcaagtcagtcgattgcgtgggatttacattggtatcagcagaaaccagggaaagcccctaagctcctgatctatgatatgtccatgttgcaaagtggggtcccatcacgtttcagtggcagtggatctgggacagatttcactctcaccatcagcagtctgcaacctgaagattttgctacgtactactgtcaacagacttatcggcttcctatgacgttcggccaagggaccaaggtgaaatcaaacgggcgg

SEQ ID NO: 1505 - DNA, 325 bp, Homo sapiens
gacatccagatgacccagtctccatcctccctgtctgcatctgtaggagaccgtgtcaccatcacttgccgggcaagtcagtggattatgatgcatttaaattggtatcagcagaaaccagggaaagcccctaagctcctgatctataatggttccgtgttgcaaagtggggtcccatcacgtttcagtggcagtggatctgggacagatttcactctcaccatcagcagtctgcaacctgaagattttgctacgtactactgtcaacaggatatttttcatcctcctacgttcggccaagggaccaaggtggaaatcaaacggg

SEQ ID NO: 1506 - DNA, 325 bp, Homo sapiens
gacatccagttgacccagtctccatcctccctgtctgcatctgtaggagaccgtgtcaccatcacttgccgggcaagtcagcgtattccgtgggatttacattggtaccagcagaaaccagggaaagcccctaagctcctgatctatgatgcttcccgtttgcaaagtggggtcccatcacgtttcagtggcagtggatctgggacagatttcactctcaccatcagcagtctgcaacctgaagattttgctacgtactactgtcaacagacgtattctttgcctttcacgttcggccaagggaccaaggtggaaatcaaacggg

SEQ ID NO: 1507 - DNA, 324 bp, Homo sapiens
gacatccagttgacccagtctccatcctccctgtctgcatctgtaggagaccgtgtcaccatcacttgccgggcaagtcagcgtattccgtgggatttacattggtaccagcagaaaccagggaaagcccctaagctcctgatctatgatacttcccgtttacaaagtggggtcccatcacgtttcagtggcagtggatctgggacagatttcactctcaccatcagcagtctgcaacctgaagattttgctacgtactactgtcaacagacgtattctttgcctttcacgttcggccaagggaccaaggtggaaatcaaacgg

SEQ ID NO: 1508 - protein, 108 aa, Homo sapiens
DIQMTQSPSSLSASVGDRVTITCRASQWIGPYLEWYQQKPGKAPKLLIYTSSFLQSGVPSRFSGSGSGTDFTLTISSLQPEDFATYYCQQSVFIPYTFGQGTKVEIKR

SEQ ID NO: 1509 - protein, 108 aa, Homo sapiens
DIQMTQSPSSLSASVGDRVTITCRASQSIAWDLHWYQQKPGKAPKLLIYDMSMLQSGVPSRFSGSGSGTDFTLTISSLQPEDFATYYCQQSYVLPFTFGQGTKVEIKR

SEQ ID NO: 1510 - protein, 108 aa, Homo sapiens
DIQMTQSPSSLSASVGDRVTITCRASQWIGPYLNWYQQKPGKAPKLLIYMGSYLQSGVPSRFSGSGSGTDFTLTISSLQPEDFATYYCQQDLYPPYTFGQGTKVEIKR

SEQ ID NO: 1511 - protein, 108 aa, Homo sapiens
DIQMTQSPSSLSASVGDRVTITCRASQWIGPYLNWYQQKPGKAPKPLIYMGSYLQSGVPSRFSGSGSGTDFTLTISSLQPEDFATYYCQQDLYPPYTFGQGTKVEIKR

SEQ ID NO: 1512 - protein, 108 aa, Homo sapiens
DIQMTQSPSSLSASVGDRVTITCRASQWIGPYLNWYQQKPGKAPKLLIYMGSYLPSGVPSRFSGSGSGTDFTLTISSLQPEDFATYYCQQDLYPPYTFGQGTKVEIKR

SEQ ID NO: 1513 - protein, 108 aa, Homo sapiens
DIQMTQSPSSLSASVGDRVTITCRASQWIGPYLNWYQQKPGKAPKLLIYMGSYLQSGVPSRFSGSGSGTDFTLTISSLQPEDFATYYCQQDLYPPFTFGQGTKVEIKR

SEQ ID NO: 1514 - protein, 108 aa, Homo sapiens
DIQMTQSPSSLSASVGDRVTITCRASQWIGPYLNWYQQKPGKAPKLLIYVGSYLHSGVPSRFSGSGSGTDFTLTISSLQPEDFATYYCQQDLYPPYTFGQGTKVEIKR

SEQ ID NO: 1515 - protein, 108 aa, Homo sapiens
DIQMTQSPSSLSASVGDRVTITCRASQWIGPYLNWYQQKPGKAPKLLIYMGSYLVSGVPSRFSGSGSGTDFTLTISSLQPEDFATYYCQQDLYPPYTFGQGTKVEIKR

SEQ ID NO: 1516 - protein, 108 aa, Homo sapiens
DIQMTQSPSSLSASVGDRVTITCRASQWIGPYLNWYQQKPGKAPKLLIYMGSYLSSGVPSRFSGSGSGTDFTLTISSLQPEDFATYYCQQDLYPPYTFGQGTKVEIKR

SEQ ID NO: 1517 - protein, 108 aa, Homo sapiens
  VARIANT 23: Xaa = Any Amino Acid
DIQMTQSPSSLSASVGDRVTITXRASQWIGPYLNWYQQKPGKAPKLLIYMGSYLQSGVPSRFSGSGSGTDFTLTISSLQPEDFATYYCQQDLYPPFTLGQGTKVEIKR

SEQ ID NO: 1518 - protein, 108 aa, Homo sapiens
  VARIANT 23: Xaa = Any Amino Acid
DIQMTQSPSSLSASVGDRVTITXRASQWIGPYLNWYQQKPGKAPKLLIYMGSYLQSGVPSRFSGSGSGTDLTLTISSLQPEDFATYYCQQDLYPPYTFGQGTKVEIKR

SEQ ID NO: 1519 - protein, 108 aa, Homo sapiens
DIQMTQSPSSLSASVGDRVTITCRASQWIGPYLNWYQQKPGKAPKLLIYMGSYLQSGVPSRFSGSGSGTDFTLTISSLQPKDFATYYCQQDLYPPYTFGQGTKVEIKR

SEQ ID NO: 1520 - protein, 108 aa, Homo sapiens
DIQMTQSPSSLSASVGDRVTITCQASQWIGPYLNWYQQKPGKAPKLLMYMGSYLQSGVPSRFSGSGSGTDFTFTISSLQPEDFATYYCQQDLYLPYTSGQGTKVEIKR

SEQ ID NO: 1521 - protein, 108 aa, Homo sapiens
DIQMTQSPSSLSASVGDRVTITCRASQWIGPYLNWYQQKPGKAPKLLIYMGSYLQSGVPSRFRGSGSGTDFTLTISSLQPEDFATYYCQQDLYPPYTFGQGTKVEIKR

SEQ ID NO: 1522 - protein, 108 aa, Homo sapiens
DIQMTQSPSSLSASVGDRVTITCRASQWIGPYLNWYQQKPGKAPKLLIYMGSYLHSGVPSRFSGSGSGTDFTLTISSLQPEDFATYYCQQDLYPPYTFGQGTKVEIKR

SEQ ID NO: 1523 - protein, 108 aa, Homo sapiens
DIQMTQSPSSLSASVGDRVTIICRASEWIGPYLNWYQQKPGKAPKLLIYMGSYLQSGVPSRFSGSGSGTDFTLTISSQQPEDFATYYCQQDLYPPYTFGQGTKVEIKR

SEQ ID NO: 1524 - protein, 108 aa, Homo sapiens
  VARIANT 23: Xaa = Any Amino Acid
DIQMTQSQSSLSAYVGDRVTITXRASQWIGPYLNWYQQKQGKAPKLLIYMGSYLQSGVPSRFSGSGSGTDFTLTISSLQPEDFATYYCQQDLYPPYTFGQGTKVEIKR

SEQ ID NO: 1525 - protein, 108 aa, Homo sapiens
DIQMTQSPSSLSAYVGDRVTITCRASQWIGPYLNWYQQKPGKAPKLLIYMGSYLQSGVPSRFSGSGSGTDFTLTISSLQPEDFATYYCQQDLYPPYTFGQGTNVEIKR

SEQ ID NO: 1526 - protein, 108 aa, Homo sapiens
  VARIANT 23: Xaa = Any Amino Acid
DIQMTQSPSSPSASVGDRVTITXRASQWIGPYLNWYQQKAGKAPKLLIYMGSYLQSGVPSRFSGSGSGTDFTLTISSLQPEDFATYYCQQDLYPPYTFGQGTKVEIKR

SEQ ID NO: 1527 - protein, 108 aa, Homo sapiens
DIQMTQSPSSLSASVGDRVTITCRASQWIGPYLNWYQQKPGKAPKLLIYMGSYLQSGVPSRFSGSGSGTDFTLTISSLQPEDFATYYCQQDLYPPYTFGQGTKLEIKR

SEQ ID NO: 1528 - protein, 108 aa, Homo sapiens
DIQMTQSPSSLSASVGDRVTITCRASQWSGPYLNWYQQKPGKAPKLLIYMGSYLQSGVPSRFSGSGSGTDFTLTISSLQPEDFATYYCQQDLYPPYTFGQGTKVEIKR

SEQ ID NO: 1529 - protein, 108 aa, Homo sapiens
DIQMTQSPSSLSASVGDRVTITCQASQWIGPYLNWYQQKPGKAPKLLIYMGSYLQSGVPSRFSGSGSGTDFTLTISSLQPEDFATYYCQQDLYPPYTFGQGTKVEIKR

SEQ ID NO: 1530 - protein, 108 aa, Homo sapiens
DIQMTQSPSSLSASVGDRVTITCRASQWIGPYLNWYQQKPGRAPKLLIYMGSYLQSGVPSRFSGSGSGTDFTLTISSLQPEDFATYYCQQDLYPPYTFGQGTKVEIKR

SEQ ID NO: 1531 - protein, 108 aa, Homo sapiens
DIQMTQSPSSLSASVGDRVTIICRASQWIGPYLNWYQQKPGKAPKLLIYMGAYLQSGVPSRFSGSGSGTDFTLTISSLQPEDFATYYCQQDLYPPYTFGQGTKVEIKR

SEQ ID NO: 1532 - protein, 108 aa, Homo sapiens
  VARIANT 23: Xaa = Any Amino Acid
DIQMTQSPSSLSASVGDRVTITXRASQWIGPYLNWYQQKPGKAPMLLIYMGSYLQSGVPSRFSGSGSGTDFTLTISSLQPEDFATYYCQQDLYPPYTFGQGTKVEIKR

SEQ ID NO: 1533 - protein, 108 aa, Homo sapiens
  VARIANT 23: Xaa = Any Amino Acid
DIQMTQSPSSLSASVGDRVIITXRASQWIGPYLNWYQQKPGKAPKLLIYMGSYLQSEVPSRFSGSGSGTDFTLTISSLQPEDFATYYCQQDLYPPYTFGQGTKVEIKR

SEQ ID NO: 1534 - protein, 108 aa, Homo sapiens
DIQMTQSPSSLSASVGDRATITCRASQWIGPYLNWYQQKPWKAPKLLIYMGSYLQSGVPSRFSGSGSGTDFTLTISSLQPEDFATYYCQQDLYPPYTFGQGTKVEIKR

SEQ ID NO: 1535 - protein, 108 aa, Homo sapiens
  VARIANT 36: Xaa = Any Amino Acid
DIQMTQSPSSLSASVGDRVTITCRASQWIGPYLNWXQQKPGKAPKPLIYMGRWAPSGVPSRFSGSGSGTDFTLTISSLQPEDFATYYCQQDLYPPFTFGQGTKVEIKR

SEQ ID NO: 1536 - protein, 108 aa, Homo sapiens
  VARIANT 36: Xaa = Any Amino Acid
DIQMTQSPSSLSASVGDRVTITCRASQWIGPYLNWXQQKPGKAPKPLIYMGYHAPSGVPSRFSGSGSGTDFTLTISSLQPEDFATYYCQQDLYPPFTFGQGTKVEIKR

SEQ ID NO: 1537 - protein, 108 aa, Homo sapiens
  VARIANT 36: Xaa = Any Amino Acid
DIQMTQSPSSLSASVGDRVTITCRASQWIGPYLNWXQQKPGKAPKPLIYMGYWASSGVPSRFSGSGSGTDFTLTISSLQPEDFATYYCQQDLYPPFTFGQGTKVEIKR

SEQ ID NO: 1538 - protein, 108 aa, Homo sapiens
  VARIANT 36: Xaa = Any Amino Acid
DIQMTQSPSSLSASVGDRVTITCRASQWIGPYLNWXQQKPGKAPKPLIYMGYWAISGVPSRFSGSGSGTDFTLTISSLQPEDFATYYCQQDLYPPFTFGQGTKVEIKR

SEQ ID NO: 1539 - protein, 108 aa, Homo sapiens
DIQMTQSPSSLSASVGDRVTITCRASQWIGPYLNWFQQKPGKAPKPLIYMGYWAPSGVPSRFSGSGSGTDFTLTISSLQPEDFATYYCQQDLYPPFTFGQGTEVEIKR

SEQ ID NO: 1540 - protein, 108 aa, Homo sapiens
DIQMTQSPSSLSASVGDRVTITCRASQWIGPYLNWYQQKPGKAPKPLIYMGFWAPSGVPSRFSGSGSGTDFTLTISSLQPEDFATYYCQQDLYPPFTFGQGTKVEIKR

SEQ ID NO: 1541 - protein, 108 aa, Homo sapiens
DIQMTQSPSSLSASVGDRVTITCRASQWIGPYLNWYQQKPGKAPKPLIYMGFCAPSGVPSRFSGSGSGTDFTLTISSLQPEDFATYYCQQDLYPPFTFGQGTKVEIKR

SEQ ID NO: 1542 - protein, 108 aa, Homo sapiens
DIQMTQSPSSLSASVGDRVTITCRAGQWIGPYLNWYQQKPGKAPKPLIYMGYWAPSGVPSRFSGSGSGTDFTLTISSLQPEDFATYYCQQDLYPPFTFGQGTKVEIKR

SEQ ID NO: 1543 - protein, 108 aa, Homo sapiens
  VARIANT 38: Xaa = Any Amino Acid
DIQMTQSPSSLSASVGDRVTITCRASQWIGPYLNWYQXKPGKAPKPLIYMGYWAPSGVPSRFSGSGSGTDFTLTISSLQPEDFATYYCQQDLYPPFTFGQGTKVEIGR

SEQ ID NO: 1544 - protein, 108 aa, Homo sapiens
DIQMTQSPSSLSASVGDRVTITCRASQWIGPYLNWYKQKPGKAPKPLIYMGYWAGSGVPSRFSGSGSGTDFTLTISSLQPEDFATYYCQQDLYPPFTFGQGTKVEIRR

SEQ ID NO: 1545 - protein, 108 aa, Homo sapiens
DIQMTQSPSSLSASVGDRVTITCRASQWIGAYLNWYQQKPGKAPKPLIYMGYWAPSGVPSRFSGSRSGTDFTLTISSLQPEDFATYYCQQDLYPPFTFGQGTKVEIKR

SEQ ID NO: 1546 - protein, 108 aa, Homo sapiens
DIQMTQSPSSLSASVGDRVTITCRASQWIGPYLNWYQQKPGKAPKPLIYMGYWAPSGVPSRFSGSGSGTDFTLTISSLQPEDFATYYCQQDGYPPFTFGQGTKVEIKR

SEQ ID NO: 1547 - protein, 108 aa, Homo sapiens
DIQMTQSPSSLSASVGDRVTITCRASQWIGPYLNWYQQKPGKAPKPLIYMGYWAPSGVPSRFSGSGSGTDFTLTISSLQPEDFATYYCQQDVYPPFTFGQGTKVEIKR

SEQ ID NO: 1548 - protein, 108 aa, Homo sapiens
DIQMTQSPSSLSASVGDRVTITCRASQWIGPYLNWYQQKPGKAPKPLIYMGYWAPSGVPSRFSGSGSGTDFTLTISSLQPEDFATYYCQQDFYPPFTFGQGTKVEIKR

SEQ ID NO: 1549 - protein, 108 aa, Homo sapiens
DIQMTQSPSSLSASVGDRVTITCRASQWIGPYLNWYQQKPGKAPKPLIYMGYWAPSGVPSRFSGSGSGTDFTLTISSLQPEDFATYYCQQDLLPPFTFGQGTKVEIKR

SEQ ID NO: 1550 - protein, 108 aa, Homo sapiens
DIQMTQSPSSLSASVGDRVTITCRASQWIGPYLNWYQQKPGKAPKPLIYMGYWAPSGVPSRFSGSGSGTDFTLTISSLQPEDSATYYCQQDIYPPFTFGQGTKVEIKR

SEQ ID NO: 1551 - protein, 108 aa, Homo sapiens
DIQMTQSPSSLSASVGDRVTITCRASQWIGPYLNWYQQKPGKAPKPLIYMGYWAPSGVPSRFSGSGSGTDFTLTISSLQPEDFATYYCQQDWYPPFTFGQGTKVEIKR

SEQ ID NO: 1552 - protein, 108 aa, Homo sapiens
DIQMTQSPSSLSASVGDRVTITCRASQWIGPYLNWYQQKPGKAPKLLIYMGSYLQSGVPSRFSGSGSRTDFTLTISSLQPEDFATYYCQQDLYPPYTFGQGTQVEIKR

SEQ ID NO: 1553 - protein, 108 aa, Homo sapiens
DIQMTQSPSSLSASVGDRVTITCRASQWIGPYLNWYQQKPGKAPKLLIYMGSYLQSGVPSRFSGSGSGTDFTLTISNLQPEDFVTYYCQQDLYPPYTFGQGTKVEIKR

SEQ ID NO: 1554 - protein, 108 aa, Homo sapiens; identical to SEQ ID NO: 577

SEQ ID NO: 1555 - protein, 108 aa, Homo sapiens
DIQMTQSPSILSASVGDRVTITCLASQWIGPYLNWYQQKPGKAPKLLIYMGSYLQSGVPSRFSGSGSGTDFTFTISSLQPEDFATYYCQQDLYPPYTFGQGTKVEIKR

SEQ ID NO: 1556 - protein, 108 aa, Homo sapiens
DIQVTQSPSALSASVGDRVTITCRASQWIGPYLNWYQQKPGKAPKPLIYMGSYLPSGVPSRFSGSGSGTDFTLTISSLQPEDFATYYCQQDLYPPYTFGQGTKVEIKR

SEQ ID NO: 1557 - protein, 108 aa, Homo sapiens
DIQMTQSPSSLSASVGDRVTITCRASQWIGPYLNWYQQKPGKAPKPLIYMGSYLPSGVPSRFSGSGSGTDFTLTISSLQPEDFATYYCQQDLYPPYTFGQGTKVEIKR

SEQ ID NO: 1558 - protein, 108 aa, Homo sapiens; identical to SEQ ID NO: 1557

SEQ ID NO: 1559 - protein, 108 aa, Homo sapiens
DIQMTQSPSSLSASVGDRVTITCRASQWIGPYLNWYQQKPGKAPKPLIYMGSYLPSGVPSRFSGSGSGTDFTLTINSLQPEDFATYYCQQDLYPPFTFGQGTKVEIKR

SEQ ID NO: 1560 - protein, 108 aa, Homo sapiens
DIQMTQSPSSLSASVGDRVTITCRAGQWIGPYLNWYQQKSGKAPKPLIYMGSYLPSGVPSRFSGSGSGTDFTLTINSLQPEDFATYYCQQDLYPPFTFGQGTKVGIKR

SEQ ID NO: 1561 - protein, 108 aa, Homo sapiens
DIQMTQSPSSLSASVGDRVTITCQASQWIGPYLNWYQQKPGEAPKPLIYMGSYLPSGVPSRFSGSGSGTDFTLTISSLQPEDFATYYCQQDLYPPFTFGQGTKVEIKR

SEQ ID NO: 1562 - protein, 108 aa, Homo sapiens
DIQMTQSPSSLSASVGDRVTITCRASQWIGPYLNWYQQKPGEAPKPLIYMGSYLPSGVPSRFSGSGSGTDFTLTISSLQPEDFATYYCQQDLYPPFTFGQGTKVEIKR

SEQ ID NO: 1563 - protein, 108 aa, Homo sapiens
DIQMTQSPSSLSASVGDRVTITCRASQWIGPYLNWYQQKPGKAPKPLIYMGSYLPSGVPSRFSGSGSGTDFTLTISSLQPEDFATYYCQQDLYPPFTFGQGTKVEIKR

SEQ ID NO: 1564 - protein, 108 aa, Homo sapiens; identical to SEQ ID NO: 1557

SEQ ID NO: 1565 - protein, 108 aa, Homo sapiens
DIQMTQSPSSLSASVGDRVTITCRAGQWIGPYLNWYQQKSGKAPKPLIYMGSYLPSGVPSRFSGSGSGTDFTLTINSLQPEDFATYYCQQDLYPPFTFGQGTKVEIKW

SEQ ID NO: 1566 - protein, 108 aa, Homo sapiens; identical to SEQ ID NO: 1557

SEQ ID NO: 1567 - protein, 108 aa, Homo sapiens
DIQMTQSPSSLSASVGDRVTITCRASQWIGPYLNWYQQKPGKAPKLLIYMGSYLQSGVPSRFSGSGSGTDFTLTISSLQPEDFATYYCQQDLYPPYAFGQGTKVEIKR

SEQ ID NO: 1568 - protein, 108 aa, Homo sapiens
DIQMTQSPSSLSASVGDRVTITCRASQWIGPYLNWYQQRPGRAPKLLIYMGSYLQSGVPSRFSGSRSGKDFTLTISSPQPEDFATYYCQQDLYPPYTFGQGTKVEIKR

SEQ ID NO: 1569 - protein, 108 aa, Homo sapiens
DIQMTQSPSSLSASVGDRVTITCRASQWIGPYLNWYQQKPGKAPKLLIYMGSYLQSGVPSRFSGSGSRTDFTLTISSLQPEDYATYYCQQDLYPPYTFGQGTKVEIKR

SEQ ID NO: 1570 - protein, 108 aa, Homo sapiens
DIQMTQSPSSPSASVGDRVTITCRASQWIGPYLNWYQQRPGKAPKLLIYMGSYLQSGVPSRFSGSGSGTDFTLTISSLQPEDFATYYCQQDLYPPFTFGQGTKVEIKR

SEQ ID NO: 1571 - protein, 108 aa, Homo sapiens; identical to SEQ ID NO: 1513

SEQ ID NO: 1572 - protein, 107 aa, Homo sapiens
DIQMTQSPSSLSASVGNRVTITCRASQWIGPYLNWYQQKPGEAPKPLIYMGSYLPSGVPSRFSGSGSGTDFALTISSLQPEDVATYYCQQDLYPPTFGQGTKVEIKR

SEQ ID NO: 1573 - protein, 108 aa, Homo sapiens
DIQMTQSPSSPSASVGDRVTITCRASQWIGPYLNWYQQKPGKAPKLLIYMGSYLQSGVPSRFSGSGSGTDFTLTISSLQPEDFATYYCQQDLYPPYTFGQGTKVEIKR

SEQ ID NO: 1574 - protein, 108 aa, Homo sapiens
DIQMTQSPSSLSASVGDRVTITCRASQWIGPYLNWYQQKPGKAPKLLIYMGSYLQSGVPSRFSGSGSGTDFTLTISSLQPEDFAMYYCQQDLYPPYTFGQGTKVEIKR

SEQ ID NO: 1575 - protein, 107 aa, Homo sapiens
DIQMTQSPSSLSASVGDRVTITCRATQWIGPYLNWYQQKPGKAPKLLIYMGSYLQSGVPSRFSGSGSGTDFTLTISSLQPEDFATYYCQQDLYPPTFGQGTKVEIKR

SEQ ID NO: 1576 - protein, 108 aa, Homo sapiens; identical to SEQ ID NO: 1560

SEQ ID NO: 1577 - protein, 108 aa, Homo sapiens; identical to SEQ ID NO: 1563

SEQ ID NO: 1578 - protein, 108 aa, Homo sapiens
DIQMTQSPSSLSASVGDRVTITCRASQWIGPYLNWYQQKPGKAPKLLIYMGSYLQSGVPSRFSGSRSGTDFTLTISSLQPEDFATYYCQQDLYPPYTFGQGTKVEIKR

SEQ ID NO: 1579 - protein, 108 aa, Homo sapiens; identical to SEQ ID NO: 1512

SEQ ID NO: 1580 - protein, 108 aa, Homo sapiens; identical to SEQ ID NO: 1562

SEQ ID NO: 1581 - protein, 108 aa, Homo sapiens; identical to SEQ ID NO: 1557

SEQ ID NO: 1582 - protein, 108 aa, Homo sapiens; identical to SEQ ID NO: 1559

SEQ ID NO: 1583 - protein, 108 aa, Homo sapiens
DIQMTQSPSSLSASAGVRVAITCRASQWIGPYLNWYQQKPGKAPKLLIYMGSYLRSGVPSRFSGSGSGTDFTLTISSLQPEDFATYYCQQDLYPPYTFGQGTKVEIKR

SEQ ID NO: 1584 - protein, 108 aa, Homo sapiens
DIQMTQSPSSLSASVGDRVTVTCRASQWIGPYLNWYQQKPGKAPKLLIYMGSYLHSGVPSRFSGSGSGTDFTLTISSLQPEDFATYYCQQDLYPPYTFGQGTKVEIKR

SEQ ID NO: 1585 - protein, 108 aa, Homo sapiens; identical to SEQ ID NO: 1513

SEQ ID NO: 1586 - protein, 108 aa, Homo sapiens
DIQMTQSPSSLSASVGDRVTITCRASQWIGPYLNWYQQKPGKAPKPLIYMGSWRPSGVPSRFSGSGSGTDFTLTISSLQPEDFATYYCQQDLYPPFTFGQGTKVEIKR

SEQ ID NO: 1587 - protein, 108 aa, Homo sapiens
DIQMTQSPSSLSASVGDRVTITCRASQWIGPYLNWYQQKPGKAPKPLIYMGYWAPSGVPSRFSGSGSGTDFTLTISSLQPEDFATYYCQQDLYPPFTFGQGTKVEIKR

SEQ ID NO: 1588 - protein, 108 aa, Homo sapiens
DIQITQSPSSLSASVGDRVTITCRASQWIGPYLNWYQQKPGKAPKPLIYMGSYLAHGVPSRFSGSGSGTDFTLTISSLQPEDFATYYCQQDLYPPYTFGQGTKVEIKR

SEQ ID NO: 1589 - protein, 108 aa, Homo sapiens
DIQMTQSPSSLSASVGDRVTITCRASQWIGPYLNWYQQKPGKAPKPLIYMGSYHGTGVPSRFSGSGSGTDFTLTISSLQPEDYATYYCQQDLYPPYTFGQGTKVEIKR

SEQ ID NO: 1590 - protein, 108 aa, Homo sapiens
DIQMTQSPSSLSASVGDRVTITCRASQWIGPYLNWYQQKPGKAPKPLIYMGSYRPLGVPSRFSGSGSGTDFTLTISSLQPEDFATYYCQQDLYPPYTFGQGTKVEIKR

SEQ ID NO: 1591 - protein, 108 aa, Homo sapiens
DIQMTQSPSSLSASVGDRVTITCRASQWIGPYLNWYQQKPGKAPKPLIYMGSYRPAGVPSRFSGSGSGTDFTLTISSLQPEDFATYYCQQDLYPPYTFGQGTKVEIKR

SEQ ID NO: 1592 - protein, 108 aa, Homo sapiens
DIQMTQSPSSLSASVGDRVTITCRASQWIGPYLNWYQQKPGKAPKPLIYMGSYRAQGVPSRFSGSGSGTDFTLTISSLQPEDFATYYCQQDLYPPYTFGQGTKVEIKR

SEQ ID NO: 1593 - protein, 108 aa, Homo sapiens
DIQMTQSPSSLSASVGDRVTITCRASQWIGPYLNWYQQKPGKAPKPLIYMGSYFASGVPSRFSGSGSGTNFTLTISSLQPEDFATYYCQQDLYPPYTFGQGTKVEIKR

SEQ ID NO: 1594 - protein, 108 aa, Homo sapiens
DIQMTQSPSSLSASVGDRVTITCRASQWIGPYLNWYQQKPGKAPKLLIYMGSYWWSGVPSRFSGSGSGTDFTLTISSLQPEDFATYYCQQDLYPPYTFGQGTKVEIKR

SEQ ID NO: 1595 - protein, 108 aa, Homo sapiens
DIQMTQSPSSLSASVGDRVTITCRASQWIGPYLNWYQQKPGKAPKLLIYMGSYLQSGVPSRFSGSGSGTDFTLTISSLQPEDFATYYCQQDLYMPAEFGQGTKVEIKR

SEQ ID NO: 1596 - protein, 108 aa, Homo sapiens
DIQMTQSPSSLSASVGDRVTITCRASQWIGPYLNWYQQKPGKAPKLLIYMGSYLQSGVPSRFSGSGSGTDFTLTISSLQPEDFATYYCQQDLYEPLNFGQGTKVEIKR

SEQ ID NO: 1597 - protein, 108 aa, Homo sapiens
DIQMTQSPSSLSASVGDRVTITCRASQWIGPYLNWYQQKPGKAPKLLTYMGSYLQSGVPSRFSGSGSGTDFTLTISSLQPEDFATYYCQQDLYMPSEFGQGTKVEIKR

SEQ ID NO: 1598 - protein, 108 aa, Homo sapiens
DIQMTQSPSSLSASVGDRVTITCRASQWIGPYLNWYQQKPGKAPKLLIYMGSYLQSGVPSRFSGSGSGTDFTLTISSLQPEDFATYYCQQDLYMPVEFGQGTKVEIKR

SEQ ID NO: 1599 - protein, 108 aa, Homo sapiens
DIQMTQSPSSLSASVGDRVTITCRASQWIGPYLNWYQQKPGKAPKLLIYMGSYLQSGVPSRFSGSGSGTDFTLTISSLQPEDFATYYCQQDLYGPGEFGQGTKVEIKR

SEQ ID NO: 1600 - protein, 108 aa, Homo sapiens
DIQMTQSPSSLSASVGDRVTITCRASQWIGPYLNWYQQKPGKAPKLLIYMGSYLQSGVPSRFSGSGSGTDFTLTISSLQPEDFATYYCQQDLYLPFTFGQGTKVEIKR

SEQ ID NO: 1601 - protein, 108 aa, Homo sapiens
DIQITQSPSSLSASVGDRVTITCRASQWIGPYLNWYQQKPGKAPKLLIYMGSYLQSGVPSRFSGSGSGTDFTLTISSLQPEDFATYYCQQDLYAPWKFGQGTKVEIKR

SEQ ID NO: 1602 - protein, 108 aa, Homo sapiens
DIQMTQSPSSLSASVGDRVTITCRADQWIGPYLNWYQQKPGKAPKLLIYMGSYLQSGVPSRFSGSGSGTDFTLTISSLQPEDFATYYCQQDLYPPYTFGQGTKVEIKR

SEQ ID NO: 1603 - protein, 108 aa, Homo sapiens
DIQMTQSPSSLSASVGDRVTITCRATQWIGPYLNWYQQKPGKAPKLLIYMGSYLQSGVPSRFSGSGSGTDFTLTISSLQPEDFATYYCQQDLYPPYTFGQGTKVEIKR

SEQ ID NO: 1604 - protein, 108 aa, Homo sapiens
DIQMTQSPSSLSASVGDRVTITCRANQWIGPYLNWYQQKPGKAPKLLIYMGSYLQSGVPSRFSGSGSGTDFTLTISSLQPEDFATYYCQQDLYPPYTFGQGTKVEIKR

SEQ ID NO: 1605 - protein, 108 aa, Homo sapiens
DIQMTQSPSSLSASVGDRVTITCRASQWIGPYLNWYQQKPGKAPKLLIYMGSYLASGVPSRFSGSGSGTDFTLTISSLQPEDFATYYCQQDLYPPYTFGQGTEVEIKR

SEQ ID NO: 1606 - protein, 108 aa, Homo sapiens
DIQMTQSPSSLSASVGDRVTITCRASQWIGPYLNWYQQKPGKAPKLLIYMGSYLWSGVPSRFSGSGSGTDFTLTISSLQPEDFATYYCQQDLYPPYTFGQGTKVEIKR

SEQ ID NO: 1607 - protein, 108 aa, Homo sapiens; identical to SEQ ID NO: 1515

SEQ ID NO: 1608 - protein, 108 aa, Homo sapiens; identical to SEQ ID NO: 1512

SEQ ID NO: 1609 - protein, 108 aa, Homo sapiens; identical to SEQ ID NO: 1516

SEQ ID NO: 1610 - protein, 108 aa, Homo sapiens
DIQMTQSPSSLSASVGDRVTITCRASQWIGPYLNWYQQKPGKAPKPLIYMGYWAPSGVPSRFSGSGSGTDFTLTISSLQPEDFATYYCQQDLYMPAEFGQGTKVEIKR

SEQ ID NO: 1611 - protein, 108 aa, Homo sapiens
DIQMTQSPSSLSASVGDRVTITCRASQWIGPYLNWYQQKPGKAPKPLIYMGYWAPSGVPSRFSGSGSGTDFTLTISSLQPEDFATYYCQQDLYEPLNFGQGTKVEIKR

SEQ ID NO: 1612 - protein, 108 aa, Homo sapiens
DIQMTQSPSSLSASVGDRVTITCRASQWIGPYLNWYQQKPGKAPKPLIYMGYWAPSGVPSRFSGSGSGTDFTLTISSLQPEDFATYYCQQDLYMPSEFGQGTKVEIKR

SEQ ID NO: 1613 - protein, 108 aa, Homo sapiens
DIQMTQSPSSLSASVGDRVTITCRASQWIGPYLNWYQQKPGKAPKPLIYMGYWAPSGVPSRFSGSGSGTDFTLTISSLQPEDFATYYCQQDLYMPVEFGQGTKVEIKR

SEQ ID NO: 1614 - protein, 108 aa, Homo sapiens
DIQMTQSPSSLSASVGDRVTITCRASQWIGPYLNWYQQKPGKAPKPLIYMGYWAPSGVPSRFSGSGSGTDFTLTISSLQPEDFATYYCQQDLYGPGEFGQGTKVEIKR

SEQ ID NO: 1615 - protein, 108 aa, Homo sapiens
DIQMTQSPSSLSASVGDRVTITCRASQWIGPYLNWYQQKPGKAPKPLIYMGYWAPSGVPSRFSGSGSGTDFTLTISSLQPEDFATYYCQQDLYLPFMFGQGTKVEIKR

SEQ ID NO: 1616 - protein, 108 aa, Homo sapiens
DIQMTQSPSSLSASVGDRVTITCRASQWIGPYLNWYQQKPGKAPKPLIYMGYWAPSGVPSRFSGSGSGTDFTLTISSLQPEDFATYYCQQDLYAPWKFGQGTKVEIKR

SEQ ID NO: 1617 - protein, 108 aa, Homo sapiens
DIQITQSPSSLSASVGDRVTITCRASQWIGPYLNWYQQKPGKAPKPLIYMGSYLAHGVPSRFSGSGSGTDFTLTISSLQPEDFATYYCQQDLYMPAEFGQGTKVEIKR

SEQ ID NO: 1618 - protein, 108 aa, Homo sapiens
DIQITQSPSSLSASVGDRVTITCRASQWIGPYLNWYQQKPGKAPKPLIYMGSYLAHGVPSRFSGSGSGTDFTLTISSLQPEDFATYYCQQDLYEPLNFGQGTKVEIKR

SEQ ID NO: 1619 - protein, 108 aa, Homo sapiens
DIQITQSPSSLSASVGDRVTITCRASQWIGPYLNWYQQKPGKAPKPLIYMGSYLAHGVPSRFSGSGSGTDFTLTISSLQPEDFATYYCQQDLYMPSEFGQGTKVEIKR

SEQ ID NO: 1620 - protein, 108 aa, Homo sapiens
DIQITQSPSSLSASVGDRVTITCRASQWIGPYLNWYQQKPGKAPKPLIYMGSYLAHGVPSRFSGSGSGTDFTLTISSLQPEDFATYYCQQDLYMPVEFGQGTKVEIKR

SEQ ID NO: 1621 - protein, 108 aa, Homo sapiens
DIQITQSPSSLSASVGDRVTITCRASQWIGPYLNWYQQKPGKAPKPLIYMGSYLAHGVPSRFSGSGSGTDFTLTISSLQPEDFATYYCQQDLYGPGEFGQGTKVEIKR

SEQ ID NO: 1622 - protein, 108 aa, Homo sapiens
DIQITQSPSSLSASVGDRVTITCRASQWIGPYLNWYQQKPGKAPKPLIYMGSYLAHGVPSRFSGSGSGTDFTLTISSLQPEDFATYYCQQDLYLPFMFGQGTKVEIKR

SEQ ID NO: 1623 - protein, 108 aa, Homo sapiens
DIQITQSPSSLSASVGDRVTITCRASQWIGPYLNWYQQKPGKAPKPLIYMGSYLAHGVPSRFSGSGSGTDFTLTISSLQPEDFATYYCQQDLYAPWKFGQGTKVEIKR

SEQ ID NO: 1624 - protein, 108 aa, Homo sapiens
DIQMTQSPSSLSASVGDRVTITCRASQWIGPYLNWYQQKPGKAPKPLIYMGSYHGTGVPSRFSGSGSGTDFTLTISSLQPEDYATYYCQQDLYMPAEFGQGTKVEIKR

SEQ ID NO: 1625 - protein, 108 aa, Homo sapiens
DIQMTQSPSSLSASVGDRVTITCRASQWIGPYLNWYQQKPGKAPKPLIYMGSYHGTGVPSRFSGSGSGTDFTLTISSLQPEDYATYYCQQDLYEPLNFGQGTKVEIKR

SEQ ID NO: 1626 - protein, 108 aa, Homo sapiens
DIQMTQSPSSLSASVGDRVTITCRASQWIGPYLNWYQQKPGKAPKPLIYMGSYHGTGVPSRFSGSGSGTDFTLTISSLQPEDYATYYCQQDLYMPSEFGQGTKVEIKR

SEQ ID NO: 1627 - protein, 108 aa, Homo sapiens
DIQMTQSPSSLSASVGDRVTITCRASQWIGPYLNWYQQKPGKAPKPLIYMGSYHGTGVPSRFSGSGSGTDFTLTISSLQPEDYATYYCQQDLYMPVEFGQGTKVEIKR

SEQ ID NO: 1628 - protein, 108 aa, Homo sapiens
DIQMTQSPSSLSASVGDRVTITCRASQWIGPYLNWYQQKPGKAPKPLIYMGSYHGTGVPSRFSGSGSGTDFTLTISSLQPEDYATYYCQQDLYGPGEFGQGTKVEIKR

SEQ ID NO: 1629 - protein, 108 aa, Homo sapiens
DIQMTQSPSSLSASVGDRVTITCRASQWIGPYLNWYQQKPGKAPKPLIYMGSYHGTGVPSRFSGSGSGTDFTLTISSLQPEDYATYYCQQDLYLPFMFGQGTKVEIKR

SEQ ID NO: 1630 - protein, 108 aa, Homo sapiens
DIQMTQSPSSLSASVGDRVTITCRASQWIGPYLNWYQQKPGKAPKPLIYMGSYHGTGVPSRFSGSGSGTDFTLTISSLQPEDYATYYCQQDLYAPWKFGQGTKVEIKR

SEQ ID NO: 1631 - protein, 108 aa, Homo sapiens
DIQMTQSPSSLSASVGDRVTITCRASQWIGPYLNWYQQKPGKAPKPLIYMGSYRPLGVPSRFSGSGSGTDFTLTISSLQPEDFATYYCQQDLYMPAEFGQGTKVEIKR

SEQ ID NO: 1632 - protein, 108 aa, Homo sapiens
DIQMTQSPSSLSASVGDRVTITCRASQWIGPYLNWYQQKPGKAPKPLIYMGSYRPLGVPSRFSGSGSGTDFTLTISSLQPEDFATYYCQQDLYEPLNFGQGTKVEIKR

SEQ ID NO: 1633 - protein, 108 aa, Homo sapiens
DIQMTQSPSSLSASVGDRVTITCRASQWIGPYLNWYQQKPGKAPKPLIYMGSYRPLGVPSRFSGSGSGTDFTLTISSLQPEDFATYYCQQDLYMPSEFGQGTKVEIKR

SEQ ID NO: 1634 - protein, 108 aa, Homo sapiens
DIQMTQSPSSLSASVGDRVTITCRASQWIGPYLNWYQQKPGKAPKPLIYMGSYRPLGVPSRFSGSGSGTDFTLTISSLQPEDFATYYCQQDLYMPVEFGQGTKVEIKR

SEQ ID NO: 1635 - protein, 108 aa, Homo sapiens
DIQMTQSPSSLSASVGDRVTITCRASQWIGPYLNWYQQKPGKAPKPLIYMGSYRPLGVPSRFSGSGSGTDFTLTISSLQPEDFATYYCQQDLYGPGEFGQGTKVEIKR

SEQ ID NO: 1636 - protein, 108 aa, Homo sapiens
DIQMTQSPSSLSASVGDRVTITCRASQWIGPYLNWYQQKPGKAPKPLIYMGSYRPLGVPSRFSGSGSGTDFTLTISSLQPEDFATYYCQQDLYLPFMFGQGTKVEIKR

SEQ ID NO: 1637 - protein, 108 aa, Homo sapiens
DIQMTQSPSSLSASVGDRVTITCRASQWIGPYLNWYQQKPGKAPKPLIYMGSYRPLGVPSRFSGSGSGTDFTLTISSLQPEDFATYYCQQDLYAPWKFGQGTKVEIKR

SEQ ID NO: 1638 - protein, 108 aa, Homo sapiens
DIQMTQSPSSLSASVGDRVTITCRASQWIGPYLNWYQQKPGKAPKPLIYMGSYRAQGVPSRFSGSGSGTDFTLTISSLQPEDFATYYCQQDLYMPAEFGQGTKVEIKR

SEQ ID NO: 1639 - protein, 108 aa, Homo sapiens
DIQMTQSPSSLSASVGDRVTITCRASQWIGPYLNWYQQKPGKAPKPLIYMGSYRAQGVPSRFSGSGSGTDFTLTISSLQPEDFATYYCQQDLYEPLNFGQGTKVEIKR

SEQ ID NO: 1640 - protein, 108 aa, Homo sapiens
DIQMTQSPSSLSASVGDRVTITCRASQWIGPYLNWYQQKPGKAPKPLIYMGSYRAQGVPSRFSGSGSGTDFTLTISSLQPEDFATYYCQQDLYMPSEFGQGTKVEIKR

SEQ ID NO: 1641 - protein, 108 aa, Homo sapiens
DIQMTQSPSSLSASVGDRVTITCRASQWIGPYLNWYQQKPGKAPKPLIYMGSYRAQGVPSRFSGSGSGTDFTLTISSLQPEDFATYYCQQDLYMPVEFGQGTKVEIKR

SEQ ID NO: 1642 - protein, 108 aa, Homo sapiens
DIQMTQSPSSLSASVGDRVTITCRASQWIGPYLNWYQQKPGKAPKPLIYMGSYRAQGVPSRFSGSGSGTDFTLTISSLQPEDFATYYCQQDLYGPGEFGQGTKVEIKR

SEQ ID NO: 1643 - protein, 108 aa, Homo sapiens
DIQMTQSPSSLSASVGDRVTITCRASQWIGPYLNWYQQKPGKAPKPLIYMGSYRAQGVPSRFSGSGSGTDFTLTISSLQPEDFATYYCQQDLYLPFMFGQGTKVEIKR

SEQ ID NO: 1644 - protein, 108 aa, Homo sapiens
DIQMTQSPSSLSASVGDRVTITCRASQWIGPYLNWYQQKPGKAPKPLIYMGSYRAQGVPSRFSGSGSGTDFTLTISSLQPEDFATYYCQQDLYAPWKFGQGTKVEIKR

SEQ ID NO: 1645 - protein, 108 aa, Homo sapiens
DIQMTQSPSSLSASVGDRVTITCRASQWIGPYLNWYQQKPGKAPKPLIYMGSYFASGVPSRFSGSGSGTNFTLTISSLQPEDFATYYCQQDLYMPAEFGQGTKVEIKR

SEQ ID NO: 1646 - protein, 108 aa, Homo sapiens
DIQMTQSPSSLSASVGDRVTITCRASQWIGPYLNWYQQKPGKAPKPLIYMGSYFASGVPSRFSGSGSGTNFTLTISSLQPEDFATYYCQQDLYEPLNFGQGTKVEIKR

SEQ ID NO: 1647 - protein, 108 aa, Homo sapiens
DIQMTQSPSSLSASVGDRVTITCRASQWIGPYLNWYQQKPGKAPKPLIYMGSYFASGVPSRFSGSGSGTNFTLTISSLQPEDFATYYCQQDLYMPSEFGQGTKVEIKR

SEQ ID NO: 1648 - protein, 108 aa, Homo sapiens
DIQMTQSPSSLSASVGDRVTITCRASQWIGPYLNWYQQKPGKAPKPLIYMGSYFASGVPSRFSGSGSGTNFTLTISSLQPEDFATYYCQQDLYMPVEFGQGTKVEIKR

SEQ ID NO: 1649 - protein, 108 aa, Homo sapiens
DIQMTQSPSSLSASVGDRVTITCRASQWIGPYLNWYQQKPGKAPKPLIYMGSYFASGVPSRFSGSGSGTNFTLTISSLQPEDFATYYCQQDLYGPGEFGQGTKVEIKR

SEQ ID NO: 1650 - protein, 108 aa, Homo sapiens
DIQMTQSPSSLSASVGDRVTITCRASQWIGPYLNWYQQKPGKAPKPLIYMGSYFASGVPSRFSGSGSGTNFTLTISSLQPEDFATYYCQQDLYLPFMFGQGTKVEIKR

SEQ ID NO: 1651 - protein, 108 aa, Homo sapiens
DIQMTQSPSSLSASVGDRVTITCRASQWIGPYLNWYQQKPGKAPKPLIYMGSYFASGVPSRFSGSGSGTNFTLTISSLQPEDFATYYCQQDLYAPWKFGQGTKVEIKR

SEQ ID NO: 1652 - protein, 108 aa, Homo sapiens
DIQMTQSPSSLSASVGDRVTITCRASQWIGPYLNWYQQKPGKAPKLLIYMGSYWWSGVPSRFSGSGSGTDFTLTISSLQPEDFATYYCQQDLYMPAEFGQGTKVEIKR

SEQ ID NO: 1653 - protein, 108 aa, Homo sapiens
DIQMTQSPSSLSASVGDRVTITCRASQWIGPYLNWYQQKPGKAPKLLIYMGSYWWSGVPSRFSGSGSGTDFTLTISSLQPEDFATYYCQQDLYEPLNFGQGTKVEIKR

SEQ ID NO: 1654 - protein, 108 aa, Homo sapiens
DIQMTQSPSSLSASVGDRVTITCRASQWIGPYLNWYQQKPGKAPKLLIYMGSYWWSGVPSRFSGSGSGTDFTLTISSLQPEDFATYYCQQDLYMPSEFGQGTKVEIKR

SEQ ID NO: 1655 - protein, 108 aa, Homo sapiens
DIQMTQSPSSLSASVGDRVTITCRASQWIGPYLNWYQQKPGKAPKLLIYMGSYWWSGVPSRFSGSGSGTDFTLTISSLQPEDFATYYCQQDLYMPVEFGQGTKVEIKR

SEQ ID NO: 1656 - protein, 108 aa, Homo sapiens
DIQMTQSPSSLSASVGDRVTITCRASQWIGPYLNWYQQKPGKAPKLLIYMGSYWWSGVPSRFSGSGSGTDFTLTISSLQPEDFATYYCQQDLYGPGEFGQGTKVEIKR

SEQ ID NO: 1657 - protein, 108 aa, Homo sapiens
DIQMTQSPSSLSASVGDRVTITCRASQWIGPYLNWYQQKPGKAPKLLIYMGSYWWSGVPSRFSGSGSGTDFTLTISSLQPEDFATYYCQQDLYLPFMFGQGTKVEIKR

SEQ ID NO: 1658 - protein, 108 aa, Homo sapiens
DIQMTQSPSSLSASVGDRVTITCRASQWIGPYLNWYQQKPGKAPKLLIYMGSYWWSGVPSRFSGSGSGTDFTLTISSLQPEDFATYYCQQDLYAPWKFGQGTKVEIKR

SEQ ID NO: 1659 - protein, 107 aa, Homo sapiens
DIQMTQSPSSLSASVGDRVTITCRASQWIGPYLNWYQQKPGKAPKLLIYMGSYLQSGVPSRFSGSGSGTDFTLTISSLQPEDFATYYCQQDLYAPQFGQGTKVEIKR

SEQ ID NO: 1660 - protein, 108 aa, Homo sapiens
DIQMTQSPSSLSASVGDRVTITCRASQWIGPYLNWYQQKPGKAPKLLIYMGSYSGSGVPSRFSGSGSGTDFTLTISSLQPEDFATYYCQQDLYEPLNFGQGTKVEIKR

SEQ ID NO: 1661 - protein, 108 aa, Homo sapiens
DIQMTQSPSSLSASVGDRVTITCRASQWIGPYSNWYQQKPGKAPKLLIYMGSYLQSGVPSRFSGSGSGTDFTLTISSLQPEDFATYYCQQDLYPPYTFGQGTKVEIKR

SEQ ID NO: 1662 - protein, 108 aa, Homo sapiens
DIQMTQSPSSLSASVGDRVTITCRASQWIGPYNNWYQQKPGKAPKLLIYMGSYLQSGVPSRFSGSGSGTDFTLTISSLQPEDFATYYCQQDLYPPYTFGQGTKVEIKR

SEQ ID NO: 1663 - protein, 108 aa, Homo sapiens
DIQMTQSPSSLSASVGDRVTITCRATQWIGPYLNWYQQKPGKAPKPLIYMGSYLPSGVPSRFSGSGSGTDFTLTISSLQPEDFATYYCQQDLYPPFTFGQGTKVEIKR

SEQ ID NO: 1664 - protein, 108 aa, Homo sapiens
DIQMTQSPSSLSASVGDRVTITCRATQWIGPYLNWYQQKPGKAPKPLIYMGYWAPSGVPSRFSGSGSGTDFTLTISSLQPEDFATYYCQQDLYPPFTFGQGTKVEIKR

SEQ ID NO: 1665 - protein, 108 aa, Homo sapiens
DIQMTQSPSSLSASVGDRVTITCRASQWIGPYLNWYQQKPGKAPKPLIYVGYWAPSGVPSRFSGSGSGTDFTLTISSLQPEDFATYYCQQDLYPPFTFGQGTKVEIKR

SEQ ID NO: 1666 - protein, 108 aa, Homo sapiens
DIQMTQSPSSLSASVGDRVTITCRASQWIGPYLNWYQQKPGKAPKPLIYMGSYLPSGVPSRFSGSGSGTDFTLTISSLQPEDFATYYCQQDLYLPFTFGQGTKVEIKR

SEQ ID NO: 1667 - protein, 108 aa, Homo sapiens
DIQMTQSPSSLSASVGDRVTITCRASQWIGPYLNWYQQKPGKAPKPLIYMGYWAPSGVPSRFSGSGSGTDFTLTISSLQPEDFATYYCQQDLYLPFTFGQGTKVEIKR

SEQ ID NO: 1668 - protein, 108 aa, Homo sapiens
DIQMTQSPSSLSASVGDRVTITCRATQWIGPYLNWYQQKPGKAPKPLIYMGSYLPSGVPSRFSGSGSGTDFTLTISSLQPEDFATYYCQQDLYLPFTFGQGTKVEIKR

SEQ ID NO: 1669 - protein, 108 aa, Homo sapiens
DIQMTQSPSSLSASVGDRVTITCRASQWIGPYLNWYQQKPGKAPKPLIYVGSYLPSGVPSRFSGSGSGTDFTLTISSLQPEDFATYYCQQDLYPPFTFGQGTKVEIKR

SEQ ID NO: 1670 - protein, 108 aa, Homo sapiens
DIQMTQSPSSLSASVGDRVTITCRATQWIGPYLNWYQQKPGKAPKPLIYVGSYLPSGVPSRFSGSGSGTDFTLTISSLQPEDFATYYCQQDLYPPFTFGQGTKVEIKR

SEQ ID NO: 1671 - protein, 108 aa, Homo sapiens
DIQMTQSPSSLSASVGDRVTITCRASQWIGPYNNWYQQKPGKAPKPLIYMGSYLPSGVPSRFSGSGSGTDFTLTISSLQPEDFATYYCQQDLYPPFTFGQGTKVEIKR

SEQ ID NO: 1672 - protein, 108 aa, Homo sapiens
DIQMTQSPSSLSASVGDRVTITCRASQWIGPYNNWYQQKPGKAPKPLIYMGYWAPSGVPSRFSGSGSGTDFTLTISSLQPEDFATYYCQQDLYPPFTFGQGTKVEIKR

SEQ ID NO: 1673 - protein, 108 aa, Homo sapiens
DIQMTQSPSSLSASVGDRVTITCRATQWIGPYNNWYQQKPGKAPKPLIYMGSYLPSGVPSRFSGSGSGTDFTLTISSLQPEDFATYYCQQDLYPPFTFGQGTKVEIKR

SEQ ID NO: 1674 - protein, 108 aa, Homo sapiens
DIQMTQSPSSLSASVGDRVTITCRASQWIGPYSNWYQQKPGKAPKPLIYMGSYLPSGVPSRFSGSGSGTDFTLTISSLQPEDFATYYCQQDLYPPFTFGQGTKVEIKR

SEQ ID NO: 1675 - protein, 108 aa, Homo sapiens
  VARIANT 32: Xaa = Any Amino Acid
DIQMTQSPSSLSASVGDRVTITCRASQWIGPXSNWYQQKPGKAPKPLIYMGYWAPSGVPSRFSGSGSGTDFTLTISSLQPEDFATYYCQQDLYPPFTFGQGTKVEIKR

SEQ ID NO: 1676 - protein, 108 aa, Homo sapiens
DIQMTQSPSSLSASVGDRVTITCRATQWIGPYSNWYQQKPGKAPKPLIYMGSYLPSGVPSRFSGSGSGTDFTLTISSLQPEDFATYYCQQDLYPPFTFGQGTKVEIKR

SEQ ID NO: 1677 - protein, 108 aa, Homo sapiens; identical to SEQ ID NO: 576

SEQ ID NO: 1678 - protein, 108 aa, Homo sapiens; identical to SEQ ID NO: 577

SEQ ID NO: 1679 - protein, 108 aa, Homo sapiens; identical to SEQ ID NO: 578

SEQ ID NO: 1680 - protein, 108 aa, Homo sapiens; identical to SEQ ID NO: 579

SEQ ID NO: 1681 - protein, 108 aa, Homo sapiens; identical to SEQ ID NO: 580

SEQ ID NO: 1682 - protein, 108 aa, Homo sapiens; identical to SEQ ID NO: 581

SEQ ID NO: 1683 - protein, 108 aa, Homo sapiens
DIQMTQSPSSLSASVGDRVTITCRASQWIGPYLNWYQQKPGKAPKPLIYMGYWAPSGVPSRFSGSGSGTDFTLTISSLQPEDFATYYCQQDGRAPFTFGQGTKVEIKR

SEQ ID NO: 1684 - protein, 108 aa, Homo sapiens
DIQMTQSPSSLSASVGDRVTITCRASQWIGPYLNWYQQKPGKAPKPLIYMGSYLPSGVPSRFSGSGSGTDFTLTISSLQPEDFATYYCQQDLWPPFTFGQGTKVEIKR

SEQ ID NO: 1685 - protein, 108 aa, Homo sapiens
DIQMTQSPSSLSASVGDRVTITCRASQWIGPYLNWYQQKPGKAPKPLIYMGSYLPSGVPSRFSGSGSGTDFTLTISSLQPEDFATYYCQQDLFPPFTFGQGTKVEIKR

SEQ ID NO: 1686 - protein, 108 aa, Homo sapiens
DIQMTQSPSSLSASVGDRVTITCRASRWIGPYLNWYQQKPGKAPKPLIYMGSYLPSGVPSRFSGSGSGTDFTLTISSLQPEDFATYYCQQDVFPPFTFGQGTKVEIKR

SEQ ID NO: 1687 - protein, 108 aa, Homo sapiens
DIQMTQSPSSLSASVGDRVTITCRASQWIGPYLNWYQQKPGKAPKPLIYMGSYLPSGVPSRFSGSGSGTDFTLTISSLQPEDFATYYCQQDGWAPFTFGQGTKVEIKR

SEQ ID NO: 1688 - protein, 108 aa, Homo sapiens
DIQMTQSPSSLSASVGDRVTITCRASQWIGPYLNWYQQKPGKAPKPLIYMGSYLPSGVPSRFSGSGSGTDFTLTISSLQPEDFATYYCQQDVSPPFTFGQGTKVEIKR

SEQ ID NO: 1689 - protein, 108 aa, Homo sapiens
DIQMTQSPSSLSASVGDRVTITCRASQWIGPYLNWYQQKPGKAPKPLIYMGSYLPSGVPSRFSGSGSGTDFTLTISSLQPEDFATYYCQQDMSPPFTFGQGTKVEIKR

SEQ ID NO: 1690 - protein, 108 aa, Homo sapiens
DIQMTQSPSSLSASVGDRVTITCRASQWIGPYLNWYQQKPGKAPKPLIYMGSYLPSGVPSRFSGSGSGTDFTLTISSLQPEDFATYYCQQDLLPPFTFGQGTKVEIKR

SEQ ID NO: 1691 - protein, 108 aa, Homo sapiens
DIQMTQSPSSLSASVGDRVTITCRASQWIGPYLNWYQQKPGKAPKPLIYMGSYLPSGVPSRFSGSGSGTDFTLTISSLQPEDFATYYCQQDLFVPFTFGQGTKVEIKR

SEQ ID NO: 1692 - protein, 108 aa, Homo sapiens
DIQMTQSPSSLSASVGDRVTITCRASQWIGPYLNWYQQKPGKAPKPLIYMGSYLPSGVPSRFSGSGSGTDFTLTISSLQPEDFATYYCQQDLVPPFTFGQGTKVEIKR

SEQ ID NO: 1693 - protein, 108 aa, Homo sapiens; identical to SEQ ID NO: 1692

SEQ ID NO: 1694 - protein, 108 aa, Homo sapiens
DIQMTQSPSSLSASVGDRVTITCRASQWIGPYLNWYQQKPGKAPKPLIYMGSYLPSGVPSRFSGSGSGTDFTLTISSLQPEDFATYYCQQDLYPPFFFGQGTKVEIKR

SEQ ID NO: 1695 - protein, 108 aa, Homo sapiens
DIQMTQSPSSLSASVGDRVTITCRASQWIGPYLNWYQQKPGKAPKPLIYMGSYLPSGVPSRFSGSGSGTDFTLTISSLQPEDFATYYCQQDFYPPFTFGQGTKVEIKR

SEQ ID NO: 1696 - protein, 108 aa, Homo sapiens; identical to SEQ ID NO: 1690

SEQ ID NO: 1697 - protein, 108 aa, Homo sapiens
DIQMTQSPSSLSASVGDRVTITCRASQWIGPYLNWYQQEPGKAPKPLIYMGSYLPSGVPSRFSGSGSGTDFTLTISSLQPEDFATYYCQQDASPPFTFGQGTKVEIKR

SEQ ID NO: 1698 - protein, 108 aa, Homo sapiens
DIQMTQSPSSLSASVGDRVTITCRASQWIGPYLNWYQQKPGKAPKPLIYMGSYLPSGVPSRFSGSGSGTDFTLTISSLQPEDFATYYCQQDVYPPFTFGQGTKVEIKR

SEQ ID NO: 1699 - protein, 108 aa, Homo sapiens
DIQMTQSPSSLSASVGDRVTITCRASQWIGPYLNWYQQKPGKAPKPLIYMGSYLPNGVPSRFSGSGSGTDFTLTISSLQPEDFATYYCQQDLIPPFTFGQGTKVEIKR

SEQ ID NO: 1700 - protein, 108 aa, Homo sapiens
DIQMTQSPSSLSASVGDRVTITCRASQWIGPYLNWYQQKPGKAPKPLIYMGSYLPSGVPSRFSGSGSGTDFTLTISSLQPEDFATYYCQQDIYPPFTFGQGTKVEIKR

SEQ ID NO: 1701 - protein, 108 aa, Homo sapiens
DIQMTQSPSSLSASVGDRVTITCRASQWIGPYLNWYQQKPGKAPKPLIYMGSYLPSGVPSRFSGSGSGTDFTLTISSLQPEDFATYYCQQDLLSPFTFGQGTKVEIKR

SEQ ID NO: 1702 - protein, 108 aa, Homo sapiens
DIQMTQSPSSLSASVGDRVTITCRASQWIGPYLNWYQQKPGKAPKPLIYMGYWAPSGVPSRFSGSGSGTDFTLTISSLQPEDFATYYCQQDVFFPFTFGQGTKVEIKR

SEQ ID NO: 1703 - protein, 108 aa, Homo sapiens
DIQMTQSPSSLSASVGDRVTITCRASQWIGPYLNWYQQKPGKAPKPLIYMGYWAPSGVPSRFSGSGSGTDFTLTISSLQPEDFATYYCQQDLFVPFTFGQGTKVEIKR

SEQ ID NO: 1704 - protein, 108 aa, Homo sapiens
DIQMTQSPSSLSASVGDRVTITCRASQWIGPYLNWYQQKPGKAPKPLIYMGYWAPSGVPSRFSGSGSGTDFTLTISSLQPEDFATYYCQQDLFFPFTFGQGTKVEIKR

SEQ ID NO: 1705 - protein, 108 aa, Homo sapiens
DIQMTQSPSSLSASVGDRVTITCRASQWIGPYLNWYQQKPGKAPKPLIYMGYWAPSGVPSRFSGSGSGTDFTLTISSLQPEDFATYYCQQDVVPPFTFGQGTKVEIKR

SEQ ID NO: 1706 - protein, 108 aa, Homo sapiens
DIQMTQSPSSLSASVGDRVTITCRASQWIGPYLNWYQQKPGKAPKPLIYMGYWAPSGVPSRFSGSGSGTDFTLTISSLQPEDFATYYCQQDMFPPFTFGQGTKVEIKR

SEQ ID NO: 1707 - protein, 108 aa, Homo sapiens
DIQMTQSPSSLSASVGDRVTITCRASQWIGPYLNWYQQKPGKAPKPLIYMGYWAPSGAPSRFSGSGSGTDFTLTISSLQPEDFATYYCQQDFYPPFTFGQGTKVEIKR

SEQ ID NO: 1708 - protein, 108 aa, Homo sapiens
DIQMTQSPSSLSASVGDRVTITCRASQWIGPYLNWYQQKPGKAPKPLIYMGYWAPSGVPSRFSGSGSGTDFTLTISSLQPEDFATYYCQQDILPPFTFGQGTKVEIKR

SEQ ID NO: 1709 - protein, 108 aa, Homo sapiens
DIQMTQSPSSLSASVGDRVTITCRASQWIGPYLNWYQQKPGKAPKPLIYMGYWAPSGVPSRFSGSGSGTDFTLTISSLQPEDFATYYCQQDVLPPFTFGQGTKVEIKR

SEQ ID NO: 1710 - protein, 108 aa, Homo sapiens
DIQMTQSPSSLSASVGDRVTITCRASQWIGPYLNWYQQKPGKAPKPLIYMGYWAPSGVPSRFSGSGSGTDFTLTISSLQPEDFATYYCQQDLYFPFTFGQGTKVEIKR

SEQ ID NO: 1711 - protein, 108 aa, Homo sapiens; identical to SEQ ID NO: 1549

SEQ ID NO: 1712 - protein, 108 aa, Homo sapiens
  VARIANT 96: Xaa = Any Amino Acid
DIQMTQSPSSLSASVGDRVTITCRASQWIGPYLNWYQQKPGKAPKPLIYMGYWAPSGVPSRFSGSGSGTDFTLTISSLQPEDFATYYCQQDLVPPXTFGQGTKVEIKR

SEQ ID NO: 1713 - protein, 108 aa, Homo sapiens
DIQMTQSPSSLSASVGDRVTITCRASQWIGPYLNWYQQKPGKAPKPLIYMGYWAPGGVPSRFSGSGSGTDFTLTIGSLQPEDFATYYCQQDVTPPFTFGQGTKVEIKR

SEQ ID NO: 1714 - protein, 108 aa, Homo sapiens; identical to SEQ ID NO: 1547

SEQ ID NO: 1715 - protein, 108 aa, Homo sapiens
DIQMTQSPSSLSASVGDRVTITCRASQWIGPYLNWYQQKPGKAPKPLIYMGYWAPSGVPSRFSGSGSGTDFTLTISSLQPEDFATYYCQQDVLWPFTFGQGTKVEIKR

SEQ ID NO: 1716 - protein, 108 aa, Homo sapiens
DIQMTQSPSSLSASVGDRVTITCRASQWIGPYLNWYQQKPGKAPKPLIYMGYWAPSGVPSRFSGSGSGTDFTLTISSLQPEDFATYYCQQDFYFPFTFGQGTKVEIKR

SEQ ID NO: 1717 - protein, 108 aa, Homo sapiens
DIQMTQSPSSLSASVGDRVTITCRASQWIGPYLNWYQQKPGKAPKPLIYMGYWAPSGVPSRFSGSGSGTDFTLTISSLQPEDFATYYCQQDSSPPFTFGQGTKVEIKR

SEQ ID NO: 1718 - protein, 108 aa, Homo sapiens
DIQMTQSPSSLSASVGDRVTITCRASQWIGPYLNWYQQKPGKAPKPLIYMGYWAPSGVPSRFSGSGSGTDFTLTISSLQPEDFATYYCQQDIYPPFTFGQGTKVEIKR

SEQ ID NO: 1719 - protein, 108 aa, Homo sapiens
DIQMTQSPSSLPASVGDRVTITCRASQWIGPYLNWYQQKPGKAPKPLIYMGYWAPSGVPSRFSGSGSGTDFTLTISSLQPEDFATYYCQQDLKAPFTFGQGTKVEIKR

SEQ ID NO: 1720 - protein, 108 aa, Homo sapiens
DIQMTQSPSSLSASVGDRVTITCRASQWIGPYLNWYQQKPGKAPKPLIYMGYWAPSGVPSRFSGSGSGTDFTLTISSLQPEDFATYYCQQDHLPPFTFGQGTKVEIKR

SEQ ID NO: 1721 - protein, 108 aa, Homo sapiens; identical to SEQ ID NO: 1549

SEQ ID NO: 1722 - protein, 108 aa, Homo sapiens
DIQMTQSPSSLSASVGDRVTITCRASQWIGPYLNWYQQKPGKAPKPLIYMGYWAPSGVPSRFSGSGSGTDFTLTISSLQPEDFATYYCQQDLFPPFTFGQGTKVEIKR

SEQ ID NO: 1723 - protein, 108 aa, Homo sapiens
DIQMTQSPSSLSASVGDRVTITCRASQWIGPYLNWYQQKPGKAPKPLIYMGYWAPSGVPSRFSGSGSGTDFTLTISSLQPEDFATYYCQQDVFPPFTFGQGTKVEIKR

SEQ ID NO: 1724 - protein, 108 aa, Homo sapiens; identical to SEQ ID NO: 1697

SEQ ID NO: 1725 - protein, 108 aa, Homo sapiens
DIQMTQSPSSLSASVGDRVTITCRASQWIGPYLNWYQQKPGKAPKPLIYMGYWAPSGVPSRFSGSGSGTDFTLTISSLQPEDFATYYCQQDGGEPFTFGQGTKVEIKR

SEQ ID NO: 1726 - protein, 108 aa, Homo sapiens
DIQMTQSPSSLSASVGDRVTITCRASQWIGPYLNWYQQKPGKAPKLLIYMGYWAQSGVPSRFSGSGSGTDFTLTISSLQPEDFATYYCQQDLYPPYTFGQGTKVEIKR

SEQ ID NO: 1727 - protein, 108 aa, Homo sapiens
DIQMTQSPSSLSASVGDRVTITCRASQNIDNYLYWYQQKPGKAPRLLIYRASYLQSGVPSRFSGSGSGTDFTLTISSLQPEDFATYYCQQLAILPITFGQGTKVEIKR

SEQ ID NO: 1728 - protein, 108 aa, Homo sapiens
DIQMTQSPSSLSASVGDRVTITCRASQTIDWGLNWYQQKPGKAPKLLIYTTSSLQSGVPSRFSGSGSGTDFTLTISSLQPEDFATYYCQQDSWHPPTFGQGTKVEIKR

SEQ ID NO: 1729 - protein, 108 aa, Homo sapiens
DIQMTQSPSSLSASVGDRVTITCRASQSIAWDLHWYQQKPGKAPKLLIYDMSMLQSGVPSRFSGSGSGTDFTLTISSLQPEDFATYYCQQTYRLPMTFGQGTKVEIKR

SEQ ID NO: 1730 - protein, 108 aa, Homo sapiens
DIQMTQSPSSLSASVGDRVTITCRASQWIMMHLNWYQQKPGKAPKLLIYNGSVLQSGVPSRFSGSGSGTDFTLTISSLQPEDFATYYCQQDIFHPPTFGQGTKVEIKR

SEQ ID NO: 1731 - protein, 108 aa, Homo sapiens
DIQLTQSPSSLSASVGDRVTITCRASQRIPWDLHWYQQKPGKAPKLLIYDASRLQSGVPSRFSGSGSGTDFTLTISSLQPEDFATYYCQQTYSLPFTFGQGTKVEIKR

SEQ ID NO: 1732 - protein, 108 aa, Homo sapiens
DIQLTQSPSSLSASVGDRVTITCRASQRIPWDLHWYQQKPGKAPKLLIYDTSRLQSGVPSRFSGSGSGTDFTLTISSLQPEDFATYYCQQTYSLPFTFGQGTKVEIKR

SEQ ID NO: 1733 - protein, 116 aa, Homo sapiens
EVQLLESGGGLVQPGGSLRLSCAASGFTFRNFGMGWVRQAPGKPLEWVSWIISSGTETYYADSVKGRFTISRDNSKNTLYLQMNSLRAEDTAVYYCAKSLGRFDYWGQGTLVTVSS

SEQ ID NO: 1734 - protein, 119 aa, Homo sapiens
EVQLLESGGGLVQPGGSLRLSCAASGFTFRNFGMGWVRQAPGKGLEWVSWIEGGGTETYYADSVKGRFTISRDNSKNTLYLQMNSLRAEDTAVYYCARLPKRGPWFDYRGQGTLVTVSS

SEQ ID NO: 1735 - protein, 116 aa, Homo sapiens
EVQLLESGGGLVQPGGSLRLSCAASGFTFRNFGMGWVRQAPGKGLEWVSWIISSGTETYYADSVKGRFTISRDNSKNTLYLQMNSLRAEDTAVYYCAKSLGRFDYFGQGTLVTVSS

SEQ ID NO: 1736 - protein, 108 aa, Homo sapiens
DIQTTQSPSSLSASVGDRVTITCRASQYIGRYLRWYQQKPGKAPKLLIYDSSVLQSGVPSRFSGSGSGTDFTLTISSLQPEDFATYYCQQRYRMPYTFGQGTRVEIKR

SEQ ID NO: 1737 - protein, 108 aa, Homo sapiens
DIQMTQSPSSLSASVGDRVTITCRASQYIGRYLRWYQQKPGKAPKLLIYDSSVLQSGVPSRFSGSGSGTDFTLTISSLQPEDFATYYCQQRYMQPFTFGQGTKVEIKR

SEQ ID NO: 1738 - protein, 108 aa, Homo sapiens
DIQMTQSPSSLSASVGDRVTITCRASQWIGRYLRWYQQKPGKAPKLLIYNGSQLQSGVPSRFSGSGSGTDFTLTISSLQPEDFATYYCQQRYLQPYTFGQGTKVEIKR

SEQ ID NO: 1739 - protein, 108 aa, Homo sapiens
DIQMTQSPSSLSASVGDRVTITCRASQYISRQLRWYQQKPGKAPRLLIYGASVLQSGIPSRFSGSGSGTDFTLTISSLQPEDFATYYCQQRYITPYTFGQGTKVEVKR

SEQ ID NO: 1740 - protein, 108 aa, Homo sapiens
DIQMTQSPSSLSASVGDRVTITCRASQYIGRYLRWYQQKPGKAPKLLIYDSSVLQSGVPSRFSGSGSGTDFTLTISSLQPEDFATYYCQQRYSSPYTFGQGTKVEIKR

SEQ ID NO: 1741 - protein, 108 aa, Homo sapiens
DIQMTQSPSSLSASVGDRVTITCRASQWIHRQLKWYQQKPGKAPKLLIYYASILQSGVPSRFSGSGSGTDFTLTISSLQPEDFATYYCQQTFSKPSTFGQGTKVEIKR

SEQ ID NO: 1742 - protein, 108 aa, Homo sapiens
DIQMTQSPSSLSASVGDRVTITCRASQKIATYLNWYQQKPGKAPKLLIYRSSSLQSAVPSRFSGSGSGTVFTLTISSLQPEDFATYYCQQTYAVPPTFGQGTKVEIKR

SEQ ID NO: 1743 - protein, 108 aa, Homo sapiens
DIQMTQSPSSLSASVGDRVTITCRASQWIDTGLAWYQQKPGKAPRLLIYNVSRLQSGVPSRFSGSGSGTDFTLTISSLQPEDFATYYCQQYWGSPTTFGQGTKVEIKR

SEQ ID NO: 1744 - protein, 108 aa, Homo sapiens
DIQMTQSPSSLSASVGDRVTITCRASQEIYSWLAWYQQRPGKAPKLLIYNASHLQSGVPSRFSGSGSGTDFTLTISSLQPEDFATYYCQQVIGDPVTFGQGTKVEIKR

SEQ ID NO: 1745 - protein, 108 aa, Homo sapiens
DIQMTQSPSSLSASVGDRVTITCRASQSISSYLNWYQQKPGKAPTLLIYRLSVLQSGVPSRFSGSGSGTDFTLTISSLQPEDFATYYCQQTYNVPPTFGQGTKVEIKR

SEQ ID NO: 1746 - protein, 108 aa, Homo sapiens
DIQMTQSPSSLSASVGDRVTITCRASQSISSYLNWYQQKPGKAPKLLIYRNSFLQSGVPSRFSGSGSGTDFTLTISSLQPEDFATYYCQQTYTVPPTFGQGTKVEIKQ

SEQ ID NO: 1747 - protein, 108 aa, Homo sapiens
DIQMTQSPSSLSASVGDRVTITCRASQSISSYLNWYQQKPGKAPKLLIYRNSQLQSGVPSRFSGSGSGTDFTLTISSLQPEDFATYYCQQTFAVPPTFGQGTKVEIKR

SEQ ID NO: 1748 - protein, 123 aa, Homo sapiens
EVQLLESGGGLVQPGGSLRLSCAASGFTFSKYWMSWVRQAPGKGLEWVSSIDFMGPHTYYADSVKGRFTISRDNSKNTLYLQMNSLRAEDTAVYYCAKGRTSMLPMKGKFDYWGQGTLVTVSS

SEQ ID NO: 1749 - protein, 118 aa, Homo sapiens
EVQLLESGGGLVQPGGSLRLSCAASGFTFYDYNMSWVRQAPGKGLEWVSTITHTGGVTYYADSVKGRFTISRDNSKNTLYLQMNSLRAEDTAVYYCAKQNPSYQFDYWGQGTLVTVSS

SEQ ID NO: 1750 - protein, 118 aa, Homo sapiens
EVQLLESGGGLVQPGGSLRLSCAASGFTFHRYSMSWVRQAPGKGLEWVSTILPGGDVTYYADSVKGRFTISRDNSKNTLYLQMNSLRAEDTAVYYCAKQTPDYMFDYWGQGTLVTVSS

SEQ ID NO: 1751 - protein, 117 aa, Homo sapiens
EVQLLESGGGLVQPGGSLRLSCAASGFTFWKYNMAWVRQAPGKGLEWVSTILGEGNNTYYADSVKGRFTISRDNSKNTLYLQMNSLRAEDTAVYYCAKTMDYKFDYWGQGTLVTVSS

SEQ ID NO: 1752 - protein, 118 aa, Homo sapiens
EVQLLESGGGLVQPGGSLRLSCTASGFTFDEYNMSWVRQAPGKGLEWVSTILPHGDRTYYADSVKGRFTISRDNSKNTLYLQMNSLRAEDTAVYYCAKQDPLYRFDYWGQGTLVTVSS

SEQ ID NO: 1753 - protein, 120 aa, Homo sapiens
EVQLLESGGGLVQPGGSLRLSCAASGFTFDLYDMSWVRQAPGKGLEWVSSIVNSGVRTYYADSVKGRFTISRDNSKNTLYLQMNSLRAEDTAVYYCAKLNQSYHWDFDYWGQGTLVTVSS

SEQ ID NO: 1754 - protein, 118 aa, Homo sapiens
EVQLLESGGGLVQPGGSLRLSCAASGFTFSDYRMSWVRQAPGKGLEWVSTIISNGKFTYYADSVKGRFTISRDNSKNTLYLQMNSLRAEDTAVYYCAKQDWMYMFDYWGQGTLVTVSS

SEQ ID NO: 1755 - protein, 35 aa, Artificial Sequence
  VARIANT 30, 31: Xaa = Any Amino Acid
  Consensus
EVQLLESGGGLVQPGGSLRLSCAASGFTFXXYNMS

SEQ ID NO: 1756 - protein, 108 aa, Homo sapiens
DIQMTQSPSSLSASVGDRVTITCRASQSISSYLNWYQQKPGKAPKLLIYRNSPLQSGVPSRFSGSGSGTDFTLTISSLQPEDFATYYCQQTYRVPPTFGQGTKVEIKR

SEQ ID NO: 1757 - protein, 108 aa, Homo sapiens
DIQMTQSPSSLSASVGDRVTITCRASQHIHRELRWYQQKPGKAPKLLIYQASRLQSGVPSRFSGSGSGTDFTLTISSLQPEDFATYYCQQKYLPPYTFGQGTKVEIKR

SEQ ID NO: 1758 - protein, 108 aa, Homo sapiens
DIQMTQSPSSLSASVGDRVTITCRASQHIHRELRWYQQKPGKAPKLLIYQASRLQSGVPSRFSGSGSGTDFTLTISSLQPEDFATYYCQQRYRVPYTFGQGTKVEIKR

SEQ ID NO: 1759 - protein, 108 aa, Homo sapiens
DIQMTQSPSSLSASVGDRVTITCRASQSIGRRLKWYQQKPGAAPRLLIYRTSWLQSGVPSRFSGSGSGTDFTLTISSLQPEDFATYYCQQTSQWPHTFGQGTKVEIKR

SEQ ID NO: 1760 - protein, 108 aa, Homo sapiens
DIQMTQSPSSLSASVGDRVTITCRASQKIYKNLRWYQQKPGKAPKLLIYNSSILQSGVPSRFSGSGSGTDFTLTISSLQPEDFATYYCQQRYLSPYTFGQGTKVEIKR

SEQ ID NO: 1761 - protein, 108 aa, Homo sapiens
DIQMTQSPSSLSASVGDRVTITCRASQKIYNNLRWYQQKPGKAPKLLIYNTSILQSGVPSRFSGSGSGTDFTLTISSLQPEDFATYYCQQRWRAPYTFGQGTKVEIKR

SEQ ID NO: 1762 - protein, 108 aa, Homo sapiens
DIQMTQSPSSLSASVGDRVTITCRASQWIYKSLGWYQQKPGKAPKLLIYQSSLLQSGVPSRFSGSGSGTDFTLTISSLQPEDFATYYCQQYHQMPRTFGQGTKVEIKR

SEQ ID NO: 1763 - protein, 108 aa, Homo sapiens
DIQMTQSPSSLSASVGDRVTITCRASQWIYRHLRWYQQKPGKAPKLLIYDASRLQSGVPTRFSGSGSGTDFTLTISSLQPEDFATYYCQQTHNPPKTFGQGTKVEIKR

SEQ ID NO: 1764 - protein, 116 aa, Homo sapiens
EVQLLESGGGLVQPGGSLRLSCAASGFTFWPYTMSWVRQAPGKGLEWVSTISPFGSTTYYADSVKGRFTISRDNSKNTLYLQMNSLRAEDTAVYYCAKGGKDFDYWGQGTLVTVSS

SEQ ID NO: 1765 - protein, 117 aa, Homo sapiens
EVQLLESGGGLVQPGGSLRLSCAASGFTFWPYTMSWVRQAPGKGLEWVSTISPFGSTTYYADSVKGRFTISRDNSKNTLYLQMNSLRAEDTAVYYCAKGNLEPFDYWGQGTLVTVSS

SEQ ID NO: 1766 - protein, 117 aa, Homo sapiens
EVQLLESGGGLVQPGGSLRLSCAASGFTFWPYTMSWVRQAPGKGLEWVSTISPFGSTTYYADSVKGRFTISRDNSKNTLYLQMNSLRAEDTAVYYCAKKLSNGFDYWGQGTLVTVSS

SEQ ID NO: 1767 - protein, 118 aa, Homo sapiens
EVQLLESGGGLVQPGGSLRLSCAASGFTFWPYTMSWVRQAPGKGLEWVSTISPFGSTTYYADSVKGRFTISRDNSKNTLYLQMNSLRAEDTAVYYCAKVVKDNTFDYWGQGTLVTVSS

SEQ ID NO: 1768 - protein, 118 aa, Homo sapiens
EVQLLESGGGLVQPGGSLRLSCAASGFTFWPYTMSWVRQAPGKGLEWVSTISPFGSTTYYADSVKGRFTISRDNSKNTLYLQMNSLRAEDTAVYYCAKNTGGKQFDYWGQGTLVTVSS

SEQ ID NO: 1769 - protein, 118 aa, Homo sapiens
EVQLLESGGGLVQPGGSLRLSCAASGFTFWPYTMSWVRQAPGKGLEWVSTISPFGSTTYYADSVKGRFTISRDNSKNTLYLQMNSLRAEDTAVYYCAKKTGPSSFDYWGQGTLVTVSS

SEQ ID NO: 1770 - protein, 120 aa, Homo sapiens
EVQLLESGGGLVQPGGSLRLSCAASGFTFWPYTMSWVRQAPGKGLEWVSTISPFGSTTYYADSVKGRFTISRDNSKNTLYLQMNSLRAEDTAVYYCAKRTENRGVSFDYWGQGTLVTVSS

SEQ ID NO: 1771 - protein, 122 aa, Homo sapiens
EVQLLESGGGLVQPGGSLRLSCAASGFTFWPYTMSWVRQAPGKGLEWVSTISPFGSTTYYADSVKGRFTISRDNSKNTLYLQMNSLRAEDTAVYYCAKSDVLKTGLDGFDYWGQGTLVTVSS

SEQ ID NO: 1772 - protein, 120 aa, Homo sapiens
EVQLLESGGGLVQPGGSLRLSCAASGFTFMAYQMAWVRQAPGKGLEWVSTIHQTGFSTYYADSVKGRFTISRDNSKNTLYLQMNSLRAEDTAVYYCAKVRSMRPYKFDYWGQGTLVTVSS

SEQ ID NO: 1773 - protein, 120 aa, Homo sapiens
EVQLLESGGGLVQPGGSLRLSCAASGFTFKDYDMTWVRQAPGKGLEWVSMISSSGLWTYYADSVKGRFTISRDNSKNTLYLQMNSLRAEDTAVYYCAKGFRLFPRTFDYWGQGTLVTVSS

SEQ ID NO: 1774 - protein, 121 aa, Homo sapiens
EVQLLESGGGLVQPGGSLRLSCAASGFTFHDYVMGWARQAPGKGLEWVSLIKPNGSPTYYADSVKGRFTISRDNSKNTLYLQMNSLRAEDTAVYYCAKGRGRFNVLQFDYWGQGTLVTVSS

SEQ ID NO: 1775 - protein, 118 aa, Homo sapiens
EVQLLESGGGLVQPGGSLRLSCTASGFTFRHYRMGWVRQAPGKGLEWVSWIRPDGTFTYYADSVKGRFTISRDNSKNTLYLQMNSLRAEDTAVYYCAKSYMGDRFDYWGQGTLVTVSS

SEQ ID NO: 1776 - protein, 116 aa, Homo sapiens
EVQLLESGGGLVQPGGSLRLSCAASGFTFMWDKMGWVRQAPGKGLEWVSFIGREGYGTYYADSVKGRFTISRDNSKNTLYLQMNSLRAEDTAVYYCAKSVASFDYWGQGTLVTVSS

SEQ ID NO: 1777 - protein, 117 aa, Homo sapiens
EVQLLESGGGLVQPGGSLRLSCAASGFTFWAYPMSWVRQAPGKGLEWVSSISSWGTGTYYADSVKGRFTISRDNSKNTLYLQMNSLRAEDTAVYYCAKGGQGSFDYWGQGTLVTVSS

SEQ ID NO: 1778 - protein, 115 aa, Unknown
  Camelid
QVQLQESGGGLVQPGGSLPLSCEASGFTFSRFGMTWVRWAPGKGVEWVSGISSLGDSTLYADSVKGRFTISRDNAKNTLYLQMNSLKPEDTAVYYCTIGGSLNPGGQGTQVTVSS

SEQ ID NO: 1779 - protein, 115 aa, Unknown
  Camelid
QVQLQESGGGLVQPGNSLRLSCAASGFTFRNFGMSWVRQAPGKEPEWVSEISQSGENTIYADSVKDRFTISRDNAKSTLYLQMNSLKPEDTAVYYCTIGGSLSRSSQGTQVTVSS

SEQ ID NO: 1780 - protein, 114 aa, Unknown
  Camelid
QVQLQESGGGLVQPGGSLRLTCTASGFTFSSFGMSWVRQAPGKGLEWVSAISSDSGTKNYADSVKGRFTISRDNAKKMLFLQMNSLRPEDTAVYYCVIGRGSPSSQGTQVTVSS

SEQ ID NO: 1781 - protein, 114 aa, Unknown
  Camelid
QVQLQESGGGLVQPGGSLRLTCTASGFTFRSFGMSWVRQAPGKGLEWVSAISADGSDKRYADSVKGRFTISRDNGKKMLTLDMNSLKPEDTAVYYCVIGRGSPASQGTQVTVSS

SEQ ID NO: 1782 - protein, 128 aa, Unknown
  Camelid
AVQLVESGGGLVQAGDSLRLSCVVSGTTFSSAAMGWFRQAPGKEREFVGAIKWSGTSTYYTDSVKGRFTISRDNVKNTVYLQMNNLKPEDTGVYTCAADRDRYRDRMGPMTTTDFRFWGQGTQVTVSS

SEQ ID NO: 1783 - protein, 124 aa, Unknown
  Camelid
QVKLEESGGGLVQTGGSLRLSCAASGRTFSSFAMGWFRQAPGREREFVASIGSSGITTNYADSVKGRFTISRDNAKNTVYLQMNSLKPEDTGLCYCAVNRYGIPYRSGTQYQNWGQGTQVTVSS

SEQ ID NO: 1784 - protein, 120 aa, Unknown
  Camelid
EVQLEESGGGLVQPGGSLRLSCAASGLTFNDYAMGWYRQAPGKERDMVATISIGGRTYYADSVKGRFTISRDNAKNTVYLQMNSLKPEDTAIYYCVAHRQTVVRGPYLLWGQGTQVTVSS

SEQ ID NO: 1785 - protein, 123 aa, Unknown
  Camelid
QVQLVESGGKLVQAGGSLRLSCAASGRTFSNYAMGWFRQAPGKEREFVAGSGRSNSYNYYSDSVKGRFTISRDNAKNTVYLQMNSLKPEDTAVYYCAASTNLWPRDRNLYAYWGQGTQVTVSS

SEQ ID NO: 1786 - protein, 125 aa, Unknown
  Camelid
EVQLVESGGGLVQAGDSLRLSCAASGRSLGIYRMGWFRQVPGKEREFVAAISWSGGTTRYLDSVKGRFTISRDSTKNAVYLQMNSLKPEDTAVYYCAVDSSGRLYWTLSTSYDYWGQGTQVTVSS

SEQ ID NO: 1787 - protein, 125 aa, Unknown
  Camelid
QVQLVEFGGGLVQAGDSLRLSCAASGRSLGIYKMAWFRQVPGKEREFVAAISWSGGTTRYIDSVKGRFTLSRDNTKNMVYLQMNSLKPDDTAVYYCAVDSSGRLYWTLSTSYDYWGQGTQVTVSS

SEQ ID NO: 1788 - protein, 124 aa, Unknown
  Camelid
EVQLVESGGGLVQAGGSLSLSCAASGRTFSPYTMGWFRQAPGKEREFLAGVTWSGSSTFYGDSVKGRFTASRDSAKNTVTLEMNSLNPEDTAVYYCAAAYGGGLYRDPRSYDYWGRGTQVTVSS

SEQ ID NO: 1789 - protein, 131 aa, Unknown
  Camelid
AVQLVESGGGLVQAGGSLRLSCAASGFTLDAWPIAWFRQAPGKEREGVSCIRDGTTYYADSVKGRFTISSDNANNTVYLQTNSLKPEDTAVYYCAAPSGPATGSSHTFGIYWNLRDDYDNWGQGTQVTVSS

SEQ ID NO: 1790 - protein, 126 aa, Unknown
  Camelid
EVQLVESGGGLVQAGGSLRLSCAASGFTFDHYTIGWFRQVPGKEREGVSCISSSDGSTYYADSVKGRFTISSDNAKNTVYLQMNTLEPDDTAVYYCAAGGLLLRVEELQASDYDYWGQGIQVTVSS

SEQ ID NO: 1791 - protein, 128 aa, Unknown
  Camelid
AVQLVDSGGGLVQPGGSLRLSCTASGFTLDYYAIGWFRQAPGKEREGVACISNSDGSTYYGDSVKGRFTISRDNAKTTVYLQMNSLKPEDTAVYYCATADRHYSASHHPFADFAFNSWGQGTQVTVSS

SEQ ID NO: 1792 - protein, 120 aa, Unknown
  Camelid
EVQLVESGGGLVQAGGSLRLSCAAYGLTFWRAAMAWFRRAPGKERELVVARNWGDGSTRYADSVKGRFTISRDNAKNTVYLQMNSLKPEDTAVYYCAAVRTYGSATYDIWGQGTQVTVSS

SEQ ID NO: 1793 - protein, 123 aa, Unknown
  Camelid
EVQLVESGGGLVQDGGSLRLSCIFSGRTFANYAMGWFRQAPGKEREFVAAINRNGGTTNYADALKGRFTISRDNTKNTAFLQMNSLKPDDTAVYYCAAREWPFSTIPSGWRYWGQGTQVTVSS

SEQ ID NO: 1794 - protein, 125 aa, Unknown
  Camelid
DVQLVESGGGWVQPGGSLRLSCAASGPTASSHAIGWFRQAPGKEREFVVGINRGGVTRDYADSVKGRFAVERDNVKNTVYLQMNRLKPEDSAIYICAARPEYSFTAMSKGDMDYWGKGTLVTVSS

SEQ ID NO: 1795 - DNA, 21 bp, Artificial Sequence
  Primer
cgcaaatgggcggtaggcgtg

SEQ ID NO: 1796 - DNA, 17 bp, Artificial Sequence
  Primer
tgagtgggtggagactg

SEQ ID NO: 1797 - DNA, 26 bp, Artificial Sequence
  Primer
ataccatggggtcgacggacatccag

SEQ ID NO: 1798 - DNA, 31 bp, Artificial Sequence
  Primer
ttcttttgcggccgcccgtttgatttccacc

SEQ ID NO: 1799 - DNA, 20 bp, Artificial Sequence
  Primer
ttcgctattacgccagctgg

SEQ ID NO: 1800 - DNA, 19 bp, Artificial Sequence
  Primer
cagtcaggcaccgtgtatg

SEQ ID NO: 1801 - DNA, 20 bp, Artificial Sequence
  Primer
aaagggggatgtgctgcaag

SEQ ID NO: 1802 - DNA, 21 bp, Artificial Sequence
  Primer
aacaatgcgctcatcgtcatc

SEQ ID NO: 1803 - protein, 7 aa, Artificial Sequence
  Linker
ASTKGPS

SEQ ID NO: 1804 - DNA, 354 bp, Homo sapiens
gaggtgcagctgttggagtctgggggaggcttggtacagcctggggggtccctgcgtctctcctgtgcagcctccggattcacctttcctaagtatgatatgatgtgggtccgccaggctccagggaagggtctagagtgggtctcatcgattgatcatctgggtgttaatacatactacgcagactccgtgaagggccggttcaccatctcccgcgacaattccaagaacacgctgtatctgcaaatgaacagcctgcgtgccgaggataccgcggtatattactgtgcgaaagagtctgattggccgagttttgactactggggtcagggaaccctggtcaccgtctcgagc

SEQ ID NO: 1805 - DNA, 348 bp, Homo sapiens
gaggtgcagctgttggagtctgggggaggcttggtacagcctggggggtccctgcgtctctcctgtgcagcctccggattcacctttgatgtttatgagatggattgggtccgccaggctccagggaagggtctagagtgggtctcatctattagtgcttatggtgatcagacatactacgcagactccgtgaagggccggttcaccatctcccgcgacaattccaagaacacgctgtatctgcaaatgaacagcctgcgtgccgaggataccgcggtatattactgtgcgaaatctggtactggttttgactactggggtcagggaaccctggtcaccgtctcgagc

SEQ ID NO: 1806 - DNA, 348 bp, Homo sapiens
gaggtgcagctgttggagtctgggggaggcttggtacagcctggggggtccctgcgtctctcctgtgcagcctccggattcacctttcctgatgcggagatggattgggtccgccaggctccagggaagggtctagagtgggtctcaacgattagtcctgagggtactaatacatactacgcagactccgtgaagggccggttcaccatctcccgcgacaattccaagaacacgctgtatctgcaaatgaacagcctgcgtgccgaggacaccgcggtatattactgtgcgaaagctggtatgtcgtttgactactggggtcagggaaccctggtcaccgtctcgagc

SEQ ID NO: 1807 - DNA, 348 bp, Homo sapiens
gaggtgcagctgttggagtctgggggaggcttggtacagcctggggggtccctgcgtctctcctgtgcagcctccggattcacctttccgtctgatgagatggattgggtccgccaggctccagggaagggtctagagtgggtctcagctattgatcctaagggttctcgtacatactacgcagactccgtgaagggccggttcaccatctcccgcgacaattccaagaacacgctgtatctgcaaatgaacagcctgcgtgccgaggacaccgcggtatattactgtgcgaaagcgggtagtgggtttgactactggggtcagggaaccctggtcaccgtctcgagc

SEQ ID NO: 1808 - DNA, 348 bp, Homo sapiens
gaggtgcagctgttggagtctgggggaggcttggtacagcctggggggtccctgcgtctctcctgtgcagcctccggattcacctttggggagtatgagatggattgggtccgccaggctccagggaagggtctagagtgggtctcatctattaattcggttggttttttgacatactacgcagactccgtgaagggccggttcaccatctcccgcgacaattccaagaacacgctgtatctgcaaatgaacagcctgcgtgccgaggacaccgcggtatattactgtgcgaaagcggggtcttcttttgactactggggtcagggaaccctggtcaccgtctcgagc

SEQ ID NO: 1809 - DNA, 348 bp, Homo sapiens
gaggtgcagctgttggagtctgggggaggcttggtacagcctggggggtccctgcgtctctcctgtgcagcctccggattcacctttaaggaggtggagatggattgggtccgccaggctccagggaagggtctagagtgggtctcaacgattgatgggagtggtgttggtacatactacgcagactccgtgaagggccggttcaccatctcccgcgacaattccaagaacacgctgtatctgcaaatgaacagcctgcgtgccgaggacaccgcggtatattactgtgcgaaaggtggtacttcttttgactactggggtcagggaaccctggtcaccgtctcgagc

SEQ ID NO: 1810 - DNA, 348 bp, Homo sapiens
gaggtgcagctgttggagtctgggggaggcttggtagagcctggggggtccctgcgtctctcctgtgcagcctccggattcacctttcatgagtctgagatggattgggtccgccaggctccagggaagggtctagagtgggtctcaacgattaatggttctggtgagagtacatactacgcagactccgtgaagggccggttcaccatctcccgcgacaattccaagaacacgctgtatctgcaaatgaacagcctgcgtgccgaggacaccgcggtatattactgtgcgaaagcgggtactagttttgactactggggtcagggaaccctggtcaccgtctcgagc

SEQ ID NO: 1811 - DNA, 348 bp, Homo sapiens
gaggtgcagctgttggagtctgggggaggcttggtacagcctggggggtccctgcgtctctcctgcgcagcctccggattcacctttcatactatggagatggattgggtccgccaggctccagggaagggtctagagtgggtctcaacgattgatggtcttggtactcatacatactacgcagactccgtgaagggccggttcaccatctcccgcgacaattccaagaacacgctgtatctgcaaatgaacagcctgcgtgccgaggacaccgcggtatattactgtgcgaaagctggggattcgtttgactactggggtcagggaaccctggtcaccgtctcgagc

SEQ ID NO: 1812 - DNA, 348 bp, Homo sapiens
gaggtgcagctgttggagtctgggggaggcttggtacagcctggggggtccctgcgtctctcctgtgcagcctccggattcaccttttctgcgtatgagatggattgggtccgccaggctccagggaagggtctggagtgggtctcatcgatttcgcagcgtggtgagtttacatactacgcagactccgtgaagggccggttcaccatctcccgcgacaattccaagaacacgctgtatctgcaaatgaacagcctgcgtgccgaggataccgcggtatattactgtgcgaaatcgggtactgggtttgactactggggtcagggaaccctggtcaccgtctcgagc

SEQ ID NO: 1813 - DNA, 348 bp, Homo sapiens
gaggtgcagctgttggagtctgggggaggcttggtacagcctggggggtccctgcgtctctcctgtgcagcctccggattcacctttgcgagtcatgagatggattgggtccgccaggctccagggaagggtctagagtgggtctcagctattagtggtagtggtggtagcacatactacgcagactccgtgaagggccggttcaccatctcccgcgacaattccaagaacacgctgtatctgcaaatgaacagcctgcgtgccgaggataccgcggtatattactgtgcgaaagcgggtgatccgtttgactactggggtcagggaaccctggtcaccgtctcgagc

SEQ ID NO: 1814 - DNA, 348 bp, Homo sapiens
gaggtgcagctgttggagtctgggggaggcttggtacagcctggggggtccctgcgtctctcctgtgcagcctccggattcacctttgagtctactgatatggattgggtccgccaggctccagggaagggtctagagtgggtctcaactattgggcggtcgggtctagatacatactacgcagactccgtgaagggccggttcaccatctcccgcgacaattccaagaacacgctgtatctgcaaatgaacagcctgcgtgccgaggacaccgcggtatattactgtgcgaaagcgtatgatccgtttgactactggggtcagggaaccctggtcaccgtctcgagc

SEQ ID NO: 1815 - DNA, 348 bp, Homo sapiens
gaggtgcagctgttggagtctgggggaggcttggtacagcctggggggtccctgcgtctctcctgtgcagcctccggattcacctttatggattcggatatggattgggtccgccaggctccagggaagggtctagagtgggtctcaactatttcgcctagtggtgagctgacatactacgcagactccgtgaagggccggttcaccatctcccgcgacaattccaagaacacgctgtatctgcaaatgaacagcctgcgtgccgaggacaccgcggtatattactgtgcgaaagcgtatagtccttttgactactggggtcagggaaccctggtcaccgtctcgagc

SEQ ID NO: 1816 - DNA, 369 bp, Homo sapiens
gaggtgcagctgttggagtctgggggaggcttggtacagcctggggggtccctgcgtctctcctgtgcagcctccggattcacctttgagaattatgatatgatgtgggtccgccaggctccagggaagggtctagagtgggtctcaactattactcatcatggtattattacatattacgcagactccgtgaagggccggttcaccatctcccgcgacaattccaagaacacgctgtatctgcaaatgaacagcctgcgtgccgaggataccgcggtatattactgtgcgaaagaggaggattggacttttttgaagacggttgtttttgactactggggtcagggaaccctggtcaccgtctcgagc

SEQ ID NO: 1817 - DNA, 351 bp, Homo sapiens
gaggtgcaactgttggagtctgggggaggcttggtacagcctggggggtccctgcgtctctcctgcgcagcctccggattcacctttggggggtatgatatgagttgggtccgccaggctccagggaagggtctagagtgggtctcatctattgatggtgtgggtcctcatacatactacgcagactccgtgaagggccggttcaccatctcccgcgacaattccaagaacacgctgtatctgcaaatgaacagcctgcgtgccgaggataccgcggtatattactgtgcgaaaggttttggtctgggttttgactactggggtcagggaaccctggtcaccgtctcgagc

SEQ ID NO: 1818 - DNA, 348 bp, Homo sapiens
gaggtgcagctgttggagtctgggggaggcttggtacagcctggggggtccctgcgtctctcctgtgcagcctccggattcacctttgagctggaggagatggattgggtccgccaggctccagggaagggtctagagtgggtctcatctattagtggtagtggtggtagcacatactacgcagactccgtgaagggccggttcaccatctcccgcgacaattccaagaacacgctgtatctgcaaatgaacagcctgcgtgccgaggacaccgcggtatattactgtgcgaaagcttatactgggtttgactactggggtcagggaaccctggtcaccgtctcgagc

SEQ ID NO: 1819 - DNA, 348 bp, Homo sapiens
gaggtgcagctgttggagtctgggggaggcttggtacagcctggggggtccctgcgtctctcctgtgcagcctccggattcacctttgaggatactgagatggattgggtccgccaggctccagggaagggtctagagtgggtctcaagtatttctgggaatggtaattcgacatactacgcagactccgtgaagggccggttcaccatctcccgcgacaattccaagaacacgctgtatctgcaaatgaacagcctgcgtgccgaggacaccgcggtatattactgtgcgaaagcttttacgccttttgactactggggtcagggaaccctggtcaccgtctcgagc

SEQ ID NO: 1820 - DNA, 348 bp, Homo sapiens
gaggtgcagctgttggagtctgggggaggcttggtacagcctggggggtccctgcgtctctcctgtgcagcctccggattcacctttcctgatgcggagatggattgggtccgccaggctccagggaagggtctagagtgggtctcaactattagtgattcgggtgttcatacatactacgcagactccgtgaagggccggttcaccatctcccgcgacaattccaagaacacgctgtatctgcaaatgaacagcctgcgtgccgaggataccgcggtatattactgtgcgaaagcggggactagttttgactactggggtcagggaaccctggtcaccgtctcgagc

SEQ ID NO: 1821 - DNA, 348 bp, Homo sapiens
gaggtgcagctgttggagtctgggggaggcttggtacagcctggggggtccctgcgtctctcctgtgcagcctccggattcacctttgataatagtgagatggattgggtccgccaggctccagggaagggtctagagtgggtctcaacgatttcgggtaagggttcgacgacatactacgcagactccgtgaagggccggttcaccatctcccgcgacaattccaagaacacgctgtatctgcaaatgaacagcctgcgtgccgaggacaccgcggtatattactgtgcgaaagcgggtacggggtttgactactggggtcagggaaccctggtcaccgtctcgagc

SEQ ID NO: 1822 - DNA, 348 bp, Homo sapiens
gaggtgcagctgttggagtctgggggaggcttggtacagcctggggggtccctgcgtctctcctgtgcagcctccggattcacctttcagtctagtgagatggattgggtccgccaggctccagggaagggtctagagtgggtctcaactattgggtctagtggtgatgatacatactacgcagactccgtgaagggccggttcaccatctcccgcgacaattccaagaacacgctgtatctgcaaatgaacagcctgcgtgccgaggacaccgcggtatattactgtgcgaaagcttttactagttttgactactggggtcagggaaccctggtcaccgtctcgagc

SEQ ID NO: 1823 - DNA, 348 bp, Homo sapiens
gaggtgcagctgttggagtctgggggaggcttggtacagcctggggggtccctgcgtctctcctgtgcagcctccggattcacctttcctcattcggagatggattgggtccgccaggctccagggaagggtctagagtgggtctcaagtatttctgggggtggtgatactacatactacgcagactccgtgaagggccggttcaccatctcccgcgacaattccaagaacacgctgtatctgcaaatgaacagcctgcgtgccgaggacaccgcggtatattactgtgcgaaagcgggtacgggttttgactactggggtcagggaaccctggtcaccgtctcgagc

SEQ ID NO: 1824 - DNA, 351 bp, Homo sapiens; identical to SEQ ID NO: 1817

SEQ ID NO: 1825 - DNA, 348 bp, Homo sapiens
gaggtgcagctgttggagtctgggggaggcttggtacagcctggggggtccctgcgtctctcctgtgcagcctccggattcacctttgggtggtatgatatgatgtgggtccgccaggctccagggaagggtctagagtgggtctcagggattacttttgatggtcattctacatactacgcagactccgtgaagggccggttcaccatctcccgcgacaattccaagaacacgctgtatctgcaaatgaacagcctgcgtgccgaggacaccgcggtatattactgtgcgaaagagggggttaattttgactactggggtcagggaaccctggtcaccgtctcgagc

SEQ ID NO: 1826 - DNA, 348 bp, Homo sapiens; identical to SEQ ID NO: 1814

SEQ ID NO: 1827 - DNA, 348 bp, Homo sapiens
gaggtgcagctgttggagtctgggggaggcttggtacagcctggggggtccctgcgtctctcctgtgcagcctccggattcaccttttatgattatgagatggattgggtccgccaggctccagggaagggtctagagtgggtctcaactatttcggctactggtgattctacatactacgcagactccgtgaagggccggttcaccatctcccgcgacaattccaagaacacgctgtatctgcaaatgaacagcctgcgtgccgaggataccgcggtatattactgtgcgaaagcgtatacgtcgtttgactactggggtcagggaaccctggtcaccgtctcgagc

SEQ ID NO: 1828 - DNA, 348 bp, Homo sapiens
gaggtgcagctgttggagtctgggggaggcttggtacagcctggggggtccctgcgtctctcctgtgcagcctccggattcacctttaaggattatgagatggattgggtccgccaggctccagggaagggtctagagtgggtctcagcgattactccggatggtcagactacatactacgcagactccgtgaagggccggttcaccatctcccgcgacaattccaagaacacgctgtatctgcaaatgaacagcctgcgtgccgaggacaccgcggtatattactgtgcgaaagctgggacttcgtttgactactggggtcagggaaccctggtcaccgtctcgagc

SEQ ID NO: 1829 - DNA, 348 bp, Homo sapiens
gaggtgcagctgttggagtctgggggaggcttggtacagcctggggggtccctgcgtctctcctgtgcagcctccggattcaccttttctgattatgagatggattgggtccgccaggctccagggaagggtctagagtgggtctcaagtattgataatagtggtttttcgacatactacgcagactccgtgaagggccggttcaccatctcccgcgacaattccaagaacacgctgtatctgcaaatgaacagcctgcgtgccgaggacaccgcggtatattactgtgcgaaagcgttttcgacttttgactactggggtcagggaaccctggtcaccgtctcgagc

SEQ ID NO: 1830 - DNA, 348 bp, Homo sapiens
gaggtgcagctgttggagtctgggggaggcttggtacagcctggggggtccctgcgtctctcctgtgcagcctccggattcacctttactaattatgagatggattgggtccgccaggctccagggaagggtctagagtgggtctcaacgattaatccgactggtcagtctacatactacgcagactccgtgaagggccggttcaccatctcccgcgacaattccaagaacacgctgtatctgcaaatgaacagcctgcgtgccgaggacaccgcggtatattactgtgcgaaagcttttacgccttttgactactggggtcagggaaccctggtcaccgtctcgagc

SEQ ID NO: 1831 - DNA, 348 bp, Homo sapiens
gaggtgcagctgttggagtctgggggaggcttggtacagcctggggggtccctgcgtctctcctgtgcagcctccggattcacctttgctaattatgagatggattgggtccgccaggctccagggaagggtctagagtgggtctcaactatttctaagatgggtgcggatacatactacgcagactccgtgaagggccggttcaccatctcccgcgacaattccaagaacacgctgtatctgcaaatgaacagcctgcgtgccgaggacaccgcggtatattactgtgcgaaagcgtggtcgggttttgactactggggtcagggaaccctggtcaccgtctcgagc

SEQ ID NO: 1832 - DNA, 348 bp, Homo sapiens
gaggtgcagctgttggagtctgggggaggcttggtacagcctggggggtccctgcgtctctcctgtgcagcctccggattcacctttgataatagtgagatggattgggtccgccaggctccagggaagggtctggagtgggtctcaacgatttctgtgcatggtgcggatacatactacgcagactccgtgaagggccggttcaccatctcccgcgacaattccaagaacacgctgtatctgcaaatgaacagcctgcgtgccgaggataccgcggtatattactgtgcgaaagcggggactagttttgactactggggtcagggaaccctggtcaccgtctcgagc

SEQ ID NO: 1833 - DNA, 348 bp, Homo sapiens
gaggtgcagctgttggagtctgggggaggcttggtacagcctggggggtccctgcgtctctcctgtgcagcctccggattcacctttgagatgagtgagatggattgggtccgccaggctccagggaagggtctagagtgggtctcagctattagtggtagtggtggtagcacatactacgcagactccgtgaagggccggttcaccatctcccgcgacaattccaagaacacgctgtatctgcaaatgaacagcctgcgtgccgaggataccgcggtatattactgtgcgaaagctggtacgccttttgactactggggtcagggaaccctggtcaccgtctcgagc

SEQ ID NO: 1834 - DNA, 348 bp, Homo sapiens
gaggtgcagctgttggagtctgggggaggcttggtacagcctggggggtccctgcgtctctcctgtgcagcctccggattcacctttaaggggagtgagatggattgggtccgccaggctccagggaagggtctggagtgggtctcaacgatttctgctgatggtagggagacatactacgcagactccgtgaagggccggttcaccatctcccgcgacaattccaagaacacgctgtatctgcaaatgaacagcctgcgtgccgaggacaccgcggtatattactgtgcgaaatcgtatacttcttttgactactggggtcagggaaccctggtcaccgtctcgagc

SEQ ID NO: 1835 - DNA, 348 bp, Homo sapiens
gaggtgcagctgttggagtctgggggaggcttggtacagcctggggggtccctgcgtctctcctgtgcagcctccggattcaccttttcgatttatgagatggattgggtccgccaggctccagggaagggtctagagtgggtctcaacgatttctgctagtggtgatactacatactacgcagactccgtgaagggccggttcaccatctcccgcgacaattccaagaacacgctgtatctgcaaatgaacagcctgcgtgccgaggacaccgcggtatattactgtgcgaaagcggggagtccttttgactactggggtcagggaaccctggtcaccgtctcgagc

SEQ ID NO: 1836 - DNA, 348 bp, Homo sapiens
gaggtgcagctgttggagtctgggggaggcttggtacagcctggggggtccctgcgtctctcctgtgcagcctccggattcacctttgagatgtatgagatggattgggtccgccaggctccagggaagggtctggagtgggtctcatctattgatctggcgggtcttcatacatactacgcagactccgtgaagggccggttcaccatctcccgcgacaattccaagaacacgctgtatctgcaaatgaacagcctgcgtgccgaggataccgcggtatattactgtgcgaaagcgggtacggggtttgactactggggtcagggaaccctggtcaccgtctcgagc

SEQ ID NO: 1837 - DNA, 348 bp, Homo sapiens
gaggtgcagctgttggagtctgggggaggcttggtacagcctggggggtccctgcgtctctcctgtgcagcctccggattcacctttagtcattatgagatggattgggtccgccaggctccagggaagggtctagagtgggtctcaactattggtcgtggtggtactaatacatactacgcagactccgtgaagggccggttcaccatctcccgcgacaattccaagaacacgctgtatctgcaaatgaacagcctgcgtgccgaggacaccgcggtatattactgtgcgaaaggggggactggttttgactactggggtcagggaaccctggtcaccgtctcgagc

SEQ ID NO: 1838 - DNA, 348 bp, Homo sapiens
gaggtgcagctgttggagtctgggggaggcttggtacagcctggggggtccctgcgtctctcctgtgcagcctccggattcacctttgatagttatgagatggattgggtccgccaggctccagggaagggtctagagtgggtctcaactattcatccgacgggtatgaatacatactacgcagactccgtgaagggccggttcaccatctcccgcgacaattccaagaacacgctgtatctgcaaatgaacagcctgcgtgccgaggacaccgcggtatattactgtgcgaaagcggggaatgggtttgactactggggtcagggaaccctggtcaccgtctcgagc

SEQ ID NO: 1839 - DNA, 348 bp, Homo sapiens; identical to SEQ ID NO: 1836

SEQ ID NO: 1840 - DNA, 348 bp, Homo sapiens
gaggtgcagctgttggagtctgggggaggcttggtacagcctggggggtccctgcgtctctcctgtgcagcctccggattcacctttccggatgttgagatggattgggtccgccaggctccagggaagggtctagagtgggtctcaagtattgatacttctggtggtctgacatactacgcagactccgtgaagggcaggttcaccatctcccgcgacaattccaagaacacgctgtatctgcaaatgaacagcctgcgtgccgaggataccgcggtatattactgtgcgaaatcttatagtccgtttgactactggggtcagggaaccctggtcaccgtctcgagc

SEQ ID NO: 1841 - DNA, 348 bp, Homo sapiens
gaggtgcagctgttggagtctgggggaggcttggtacagcctggggggtccctgcgtctctcctgtgcagcctccggattcacctttgagagtgcggagatggattgggtccgccaggttccagggaagggtctagagtgggtctcaacgatttctccgtctggtcatggtacatactacgcagactccgtgaagggccggttcaccatctcccgcgacaattccaagaacacgctgtatctgcaaatgaacagcctgcgtgccgaggacaccgcggtatattactgtgcgaaatcggggagtggttttgactactggggtcagggaaccctggtcaccgtctcgagc

SEQ ID NO: 1842 - DNA, 348 bp, Homo sapiens; identical to SEQ ID NO: 1806

SEQ ID NO: 1843 - DNA, 348 bp, Homo sapiens
gaggtgcagctgttggagtctgggggaggcttggtacagcctggggggtccctgcgtctctcctgtgcagcctccggattcacctttggggattatcagatggattgggtccgccaggctccagggaagggtctagagtgggtctcaactattaatgagaatggtactatgacatactacgcagactccgtgaagggccggttcaccatctcccgcgacaattccaagaacacgctgtatctgcaaatgaacagcctgcgtgccgaggataccgcggtatattactgtgcgaaagcgtatagtggttttgactactggggtcagggaaccctggtcaccgtctcgagc

SEQ ID NO: 1844 - DNA, 348 bp, Homo sapiens
gaggtgcagctgttggagtctgggggaggcttggtacagcctggggggtccctgcgtctctcctgtgcagcctccggattcaccttttcgtcgtatgggatggattgggtccgccaggctccagggaagggtctggagtgggtctcatctattagttctgatggtttgaatacatactacgcagactccgtgaagggccggttcaccatctcccgcgacaattccaagaacacgctgtatctgcaaatgaacagcctgcgtgccgaggataccgcggtatattactgtgcgaaattttatgatccgtttgactactggggtcagggaaccctggtcaccgtctcgagc

SEQ ID NO: 1845 - DNA, 348 bp, Homo sapiens
gaggtgcagctgttggagtctgggggaggcttggtacagcctggggggtccctgcgtctctcctgtgcagcctccggattcacctttaagagttatgggatggattgggtccgccaggctccagggaagggtctagagtgggtctcagcgattggtccgacgggtcgtgatacatactacgcagactccgtgaagggccggttcaccatctcccgcgacaattccaagaacacgctgtatctgcaaatgaacagcctgcgtgccgaggacaccgcggtatattactgtgcgaaagagtatacgccttttgactactggggtcagggaaccctggtcaccgtctcgagc

SEQ ID NO: 1846 - DNA, 348 bp, Homo sapiens
gaggtgcagctgttggagtctgggggaggcttggtacagcctggggggtccctgcgtctctcctgtgcagcctccggattcacctttgatgagtatggtatggattgggtccgccaggctccagggaagggtctagagtgggtctcaactattagtcctaatggtcagagtacatactacgcagactccgtgaagggccggttcaccatctcccgcgacaattccaagaacacgctgtatctgcaaatgaacagcctgcgtgtcgaggacaccgcggtatattactgtgcgaaagagtatgatagttttgactactggggtcagggaaccctggtcaccgtctcgagc

SEQ ID NO: 1847 - DNA, 348 bp, Homo sapiens
gaggtgcagctgttggagtctgggggaggcttggtacagcctggggggtccctgcgtctctcctgtgcagcctccggattcaccttttctgattatgatatggattgggtccgccaggctccagggaagggtctcgagtgggtctcaactattgagggtaggggtcgtaagacatactacgcagactccgtgaagggccggttcaccatctcccgcgacaattccaagaacacgctgtatctgcaaatgaacagcctgcgtgccgaggacactgcggtatattactgtgcgaaagcgtttacgaattttgactactggggtcagggaaccctggtcaccgtctcgagc

SEQ ID NO: 1848 - DNA, 348 bp, Homo sapiens
gaggtgcagctgttggagtctgggggaggcttggtacagcctggggggtccctgcgtctctcctgtgcagcctccggattcaccttttcttggtatgatatggattgggtccgccaggctccagggaagggtctagagtgggtctcaactattacttcgcatggtattgatacatactacgcagactccgtgaagggccggttcaccatctcccgcgacaattccaagaacacgctgtatctgcaaatgaacagcctgcgtgccgaggacaccgcggtatattactgtgcgaaagcttttgatccgtttgactactggggtcagggaaccctggtcaccgtctcgagc

SEQ ID NO: 1849 - DNA, 348 bp, Homo sapiens
gaggtgcagctgttggagtctgggggaggcttggtacagcctggggggtccctgcgtctctcctgtgcagcctccggattcacctttgatagggaggagatggattgggtccgccaggctccagggaagggtctagagtgggtctcaactattttgccgtcgggtaggaagacatactacgcagactccgtgaagggccggttcaccatctcccgcgacaattccaagaacacgctgtatctgcaaatgaacagcctgcgtgccgaggacaccgcggtatattactgtgcgaaagcttatactggctttaggtactggggtcagggaaccctggtcaccgtctcgagc

SEQ ID NO: 1850 - DNA, 348 bp, Homo sapiens
gaggtgcagctgttggagtctgggggaggcttggtacagcctggggggtccctgcgtctctcctgtgcagcctccggattcacctttgatagggaggagatggattgggtccgccaggctccagggaagggtcgagagtgggtctcaactatttcgccgcgcggtaggacgacatactacgcagactccgtgaggggccggttcaccatctcccgcgacaattccaagaacatgctgtatctgcaaatgaacggcctgcgtgccgaggacaccgcggtatattactgtgcgaaagcttatactgggtttaagtactggggtcagggaaccctggtcaccgtctcgagc

SEQ ID NO: 1851 - DNA, 348 bp, Homo sapiens
gaggtgcagctgttggagtctgggggaggcttggtacagcctggggggtccctgcgtctctcctgtgcagcctccggattcacctttcgggattatgagatggattgggtccgccaggctccagggaagggtcgagagtgggtctcaagtattgggccgtctggttcggagacatggtacgcagactccgtgaagggccggttcaccatctcccgcgacaattccaagaacacgctgtatctgcaaatgaacagcctgcgtgccgaggataccgcggtatattactgtgcgaaagcgtatacggggtttgggtactggggtcagggaaccctggtcaccgtctcgagc

SEQ ID NO: 1852 - DNA, 348 bp, Homo sapiens
gaggtgcagctgttggagtctgggggaggcttggtacagcctggggggtccctgcgtctctcctgtgcagcctccggattcacctttcgggattatgagatggattggatccgccaggctccagggaagggtctagagtgggtctcaagtattggtccgtctggttcgttcacacgctacgcagactccgtgaagggccggttcaccatctcccgcgacaattccaagaacacgctgtatctgcaaatgaacagcctgcgtgccgaggacaccgcggtatattactgtgcgaaagcgtatacggggtttaggtactggggtcagggaaccctggtcaccgtctcgagc

SEQ ID NO: 1853 - DNA, 348 bp, Homo sapiens
gaggtgcagctgttggagtctgggggaggcttggtacagcctggggggtccctgcgtctctcctgtgcagcctccggattcacctttaatctgtattctatggattgggtccgccaggctccagggaagggtctagagtgggtctcaactattgatcgtaatggtgagcgtacatactacgcagactccgtgaagggccggttcaccatctcccgcgacaattccaagaacacgctgtatctgcaaatgaacagcctgcgtgccgaggacaccgcggtatattactgtgcgaaagcttttgatggttttgactactggggtcagggaaccctggtcaccgtctcgagc

SEQ ID NO: 1854 - DNA, 360 bp, Homo sapiens
gaggtgcagctgttggagtctgggggaggcttggtacagcctggggggtccctgcgtctctcctgtgcagcctccggattcacctttaaggattatgatatgatgtgggtccgccaggctccagggaagggtctagagtgggtctcatctatttctgattggggtaggcggacatactacgcagactccgtgaagggccggttcaccatctcccgcgacaattccaagaacacgctgtatctgcaaatgaacagcctgcgtgccgaggacaccgcggtatattactgtgcgaaagaggcggcttgggcggaggggtcttttgactactggggtcagggaaccctggtcaccgtctcgagc

SEQ ID NO: 1855 - DNA, 357 bp, Homo sapiens
gaggtgcagctgttggagtctgggggaggcttggtacagcctggggggtccctgcgtctctcctgtgcagcctccggattcacctttgcgctgtatgatatgagttgggtccgccaggctccagggaagggtctagagtgggtctcaactattacgcctttgggttcgccgacatactacgcagactccgtgaagggccggttcaccatctcccgcgacgattccaagaacacgctgtatctgcaaatgaacagcctgcgtgccgaggataccgcggtatattactgtgcgaaagtgcattcggtggagaatgagtttgactactggggtcagggaaccctggtcaccgtctcgagc

SEQ ID NO: 1856 - DNA, 348 bp, Homo sapiens; identical to SEQ ID NO: 1805

SEQ ID NO: 1857 - DNA, 348 bp, Homo sapiens; identical to SEQ ID NO: 1832

SEQ ID NO: 1858 - DNA, 348 bp, Homo sapiens
gaggtgcagctgttggagtctgggggaggcttggtacagcctggggggtccctgcgtctctcctgtgcagcctccggattcacctttcaggatacggagatggattgggtccgccaggctccagggaagggtctagagtgggtctcaactattggtccgagtggtacttcgacatactacgcagactccgtgaagggccggttcaccatctcccgcgacaattccaagaacacgctgtatctgcaaatgaacagcctgcgtgccgaggacaccgcggtatattactgtgcgaaatcttattctggttttgactactggggtcagggaaccctggtcaccgtctcgagc

SEQ ID NO: 1859 - DNA, 348 bp, Homo sapiens
gaggtgcagctgttggagtctgggggaggcttggtacagcctggggggtccctgcgtctctcctgtgcagcctccggattcacctttaatgattatgagatggattgggtccgccaggctccagggaagggtctggagtgggtctcatcgattagtactaatggtatgcatacatactacgcagactccgtgaagggccggttcaccatctcccgcgacaattccaagaacacgctgtatctgcaaatgaacagcctgcgtgccgaggataccgcggtatattactgtgcgaaagcttttgatccttttgactactggggtcagggaaccctggtcaccgtctcgagc

SEQ ID NO: 1860 - DNA, 348 bp, Homo sapiens
gaggtgcagctgttggagtctgggggaggcttggtacagcctggggggtccctgcgtctctcctgtgcagcctccggattcaccttttctgatcatgagatggattgggtccgccaggctccagggaagggtctagagtgggtctcatctatttcgcctgctggtatgagtacatactacgcagactccgtgaagggccggttcaccatctcccgcgacaattccaagaacacgctgtatctgcaaatgaacagcctgcgtgccgaggacaccgcggtatattactgtgcgaaaggtggggatccttttgactactggggtcagggaaccctggtcaccgtctcgagc

SEQ ID NO: 1861 - DNA, 348 bp, Homo sapiens
gaggtgcagctgttggagtctgggggaggcttggtacagcctggggggtccctgcgtctctcctgtgcagcctccggattcaccttttcgcgggatgagatggattgggtccgccaggctccagggaagggtctagagtgggtctcaacgattgatgggcatggtttgcggacatactacgcagactccgtgaagggccggttcaccatctcccgcgacaattccaagaacacgctgtatctgcaaatgaacagcctgcgtgccgaggataccgcggtatattactgtgcgaaagctggttcgggttttgactactggggtcagggaaccctggtcaccgtctcgagc

SEQ ID NO: 1862 - DNA, 348 bp, Homo sapiens
gaggtgcagctgttggagtctgggggaggcttggtacagcctggggggtccctgcgtctctcctgtgcagcctccggattcacctttgagaagtatgagatggattgggtccgccaggctccagggaagggtctagagtgggtctcaactatcagtcctgatggtatggttacatactacgcagactccgtgaagggccggttcaccatctcccgcgacaattccaagaacacgctgtatctgcaaatgaacagcctgcgtgccgaggacaccgcggtatattactgtgcgaaagctgcttcgggttttgactactggggtcagggaaccctggtcaccgtctcgagc

SEQ ID NO: 1863 - DNA, 348 bp, Homo sapiens
gaggtgcagctgttggagtctgggggaggcttggtacagcctggggggtccctgcgtctctcctgtgcagcctccggattcacctttgagagtgcggagatggattgggtccgccaggctccagggaagggtctagagtgggtctcagctattgagcgtgatggtactactacatactacgcagactccgtgaagggccggttcaccatctcccgcgacaattccaagaacatgctgtatctgcaaatgaacagcctgcgtgccgaggacaccgcggtatattactgtgcgaaagctgggactccttttgactactggggtcagggaaccctggtcaccgtctcgagc

SEQ ID NO: 1864 - DNA, 348 bp, Homo sapiens
gaggtgcagctgttggagtctgggggaggcttggtacagcctggggggtccctgcgtctctcctgtgcagcctccggattcacctttccggagagtgagatggattgggtccgccaggctccagggaagggtctagagtgggtctcaactattagtccgcctggtaatttaacatactacgcagactccgtgaagggccggttcaccatctcccgcgacaattccaagaacacgctgtatctgcaaatgaacagcctgcgtgccgaggacaccgcggtatattactgtgcgaaagctggtgagggttttgactactggggtcagggaaccctggtcaccgtctcgagc

SEQ ID NO: 1865 - DNA, 348 bp, Homo sapiens
gaggtgcagctgttggagtctgggggaggcttggtacagcctggggggtccctgcgtctctcctgtgcagcctccggattcacctttgctggtatggagatggattgggtccgccaggctccagggaagggtctagagtgggtctcaacgattagtcctggtggtcaggatacatactacgcagactccgtgaagggccggttcaccatctcccgcgacaattccaagaacacgctgtatctgcaaatgaacagcctgcgtgccgaggacaccgcggtatattactgtgcgaaagcgggtgcgccgtttgactactggggtcagggaaccctggtcaccgtctcgagc

SEQ ID NO: 1866 - DNA, 348 bp, Homo sapiens
gaggtgcagctgttggagtctgggggaggcttggtacagcctggggggtccctgcgtctctcctgtgcagcctccggattcacctttgcgtggtatgagatggattgggtccgccaggctccagggaagggtctagagtgggtctcaactattaataattcgggtacgaagacatactacgcagactccgtgaagggccggttcaccatctcccgcgacaattccaagaacacgctgtatctgcaaatgaacagcctgcgtgccgaggataccgcggtatattactgtgcgaaagctggggagggttttgactactggggtcagggaaccctggtcaccgtctcgagc

SEQ ID NO: 1867 - DNA, 369 bp, Homo sapiens; identical to SEQ ID NO: 1816

SEQ ID NO: 1868 - DNA, 348 bp, Homo sapiens
gaggtgcagctgttggagtctgggggaggcttggtacagcctggggggtccctgcgtctctcctgtgcagcctccggattcacctttgctggttattcgatggattgggtccgccaggctccagggaagggtctagagtgggtctcaactatttctcctcgtggtgggggtacatactacgcagactccgtgaagggccggttcaccatctcccgcgacaattccaagaacacgctgtatctgcaaatgaacagcctgcgtgccgaggataccgcggtatattactgtgcgaaagagggtactggttttgcctactggggtcagggaaccctggtcaccgtctcgagc

SEQ ID NO: 1869 - DNA, 348 bp, Homo sapiens
gaggtgcagctgttggagtctgggggaggcttggtacagcctggggggtccctgcgtctctcctgtgcagcctccggattcacctttcgtaggtatgatatggattgggtccgccaggctccagggaagggtctagagtgggtctcatcgattactgggagtggtgctatgacatactacgcagactccgtgaagggccggttcaccatctcccgcgacaattccaagaacacgctgtatctgcaaatgaacagcctgcgtgccgaggacaccgcggtatattactgtgcgaaagcggggactggttttgactactggggtcagggaaccctggtcaccgtctcgagc

SEQ ID NO: 1870 - DNA, 348 bp, Homo sapiens
gaggtgcagctgttggagtctgggggaggcttggtacagcctggggggtccctgcgtctctcctgtgcagcctccggattcacctttggggattatcagatggattgggtccgccaggctccagggaagggtctagagtgggtctcatcgattactgggagtggtgctatgacatactacgcagactccgtgaagggccggttcaccatctcccgcgacaattccaagaacacgctgtatctgcaaatgaacagcctgcgtgccgaggacaccgcggtatattactgtgcgaaagcttatacggggtttgactactggggtcagggaaccctggtcaccgtctcgagc

SEQ ID NO: 1871 - DNA, 348 bp, Homo sapiens
gaggtgcagctgttggagtctgggggaggcttggtacagcctggggggtccctgcgtctctcctgtgcagcctccggattcacctttgatagggaggagatggattgggtccgccaggctccagggaagggtctagagtgggtctcaactatttcgccgtcgggtaggaagacatactacgcagactccgtgaagggccggttcaccatctcccgcgacaattccaagaacacgctgtatctgcaaatgaacagcctgcgtgccgaggacaccgcggtatattactgtgcgaaacatgggactggttttgactactggggtcagggaaccctggtcaccgtctcgagc

SEQ ID NO: 1872 - DNA, 348 bp, Homo sapiens
gaggtgcagctgttggagtctgggggaggcttggtacagcctggggggtccctgcgtctctcctgtgcagcctccggattcacctttcgggattatgagatggattgggtccgccaggctccagggaagggtctagagtgggtctcaagtattggtccgtctggttcggagacatactacgcagactccgtgaagggccggttcaccatctcccgcgacaattccaagaacacgctgtatctgcaaatgaacagcctgcgtgccgaggataccgcggtatattactgtgcgaaagcgtatacgtcgtttgactactggggtcagggaaccctggtcaccgtctcgagc

SEQ ID NO: 1873 - DNA, 348 bp, Homo sapiens
gaggtgcagctgttggagtctgggggaggcttggtacagcctggggggtccctgcgtctctcctgtgcagcctccggattcacctttagttcgtatgagatggattgggtccgccaggctccagggaagggtctagagtgggtctcaactatttcggcggatggtgttacgacatactacgcagactccgtgaagggccggttcaccatctcccgcgacaattccaagaacacgctgtatctgcaaatgaacagcctgcgtgccgaggacaccgcggtatattactgtgcgaaagcttttgatgcttttgactactggggtcagggaaccctggtcaccgtctcgagc

SEQ ID NO: 1874 - DNA, 348 bp, Homo sapiens
gaggtgcagctgttggagtctgggggaggcttggtacagcctggggggtccctgcgtctctcctgtgcagcctccggattcacctttgataagagtgagatggattgggtccgccaggctccagggaagggtctagagtgggtctcaactattgattcgaagggtcttcggacatactacgcagactccgtgaagggccggttcaccatctcccgcgacaattccaagaacacgctgtatctgcaaatgaacagcctgcgtgccgaggataccgcggtatattactgtgcgaaagcttttgcgggttttgactactggggtcagggaaccctggtcaccgtctcgagc

SEQ ID NO: 1875 - DNA, 348 bp, Homo sapiens
gaggtgcagctgttggagtctgggggaggcttggtacagcctggggggtccctgcgtctctcctgtgcagcctccggattcaccttttttgattatgagatggattgggtccgccaggctccagggaagggtctagagtgggtctcaacgatttcgaggaatggtatggttacatactacgcagactccgtgaagggccggttcaccatctcccgcgacaattccaagaacacgctgtatctgcaaatgaacagcctgcgtgccgaggacaccgcggtatattactgtgcgaaagcgggtacgccttttgactactggggtcagggaaccctggtcaccgtctcgagc

SEQ ID NO: 1876 - DNA, 348 bp, Homo sapiens
gaggtgcagctgttggagtctgggggaggcttggtacagcctggggggtccctgcgtctctcctgtgcagcctccggattcacctttaaggattatgagatggattgggtccgccaggctccagggaagggtctagagtgggtctcaactattgattcgaagggtcttcggacatactacgcagactccgtgaagggccggttcaccatctcccgcgacaattccaagaacacgctgtatctgcaaatgaacagcctgcgtgccgaggataccgcggtatattactgtgcgaaagcttttgcgggttttgactactggggtcagggaaccctggtcaccgtctcgagc

SEQ ID NO: 1877 - DNA, 348 bp, Homo sapiens
gaggtgcagctgttggagtctgggggaggcttggtacagcctggggggtccctgcgtctctcctgtgcagcctccggattcacctttcgggattatgagatggattgggtccgccaggctccagggaagggtctagagtgggtctcaagtattggtccgtctggttcggagacatactacgcagactccgtgaagggccggttcaccatctcccgcgacaattccaaggacacgctgtatctgcaaatgaacagcctgcgtgccgaggacaccgcggtatattactgtgcgaaatcgggtacggggtttgactactggggtcagggaaccctggtcaccgtctcgagc

SEQ ID NO: 1878 - DNA, 348 bp, Homo sapiens
gaggtgcagctgttggagtctgggggaggcttggtacagcctggggggtccctgcgtctctcctgtgcagcctccggattcacctttgcgcagtatgagatggattgggtccgccaggctccagggaagggtctagagtgggtctcatcgattagtcataatggtaggcatgcatactacgcagactccgtgaagggccggttcaccatctcccgcgacaattccaagaacacgctgtatctgcaaatgaacagcctgcgtgccgaggacaccgcggtatattactgtgcgaaatcgggggatgggtttgactactggggtcagggaaccctggtcaccgtctcgagc

SEQ ID NO: 1879 - DNA, 348 bp, Homo sapiens
gaggtgcagctgttggagtctgggggaggcttggtacagcctggggggtccctgcgtctctcctgtgcagcctccggattcacctttgagtggtttgagatggattgggtccgccaggctccagggaagggtctagagtgggtctcaactatttctatggggggtgataatacatactacgcagactccgtgaagggccggttcaccatctcccgcgacaattccaagaacacgctgtatctgcaaatgaacagcctgcgtgccgaggacaccgcggtatattactgtgcgaaagctgggtcggcgtttgactactggggtcagggaaccctggtcaccgtctcgagc

SEQ ID NO: 1880 - DNA, 348 bp, Homo sapiens
gaggtgcagctgttggagtctgggggaggcttggtacagcctggggggtccctgcgtctctcctgtgcagcctccggattcacctttatgaagtatgagatggattgggtccgccaggctccagggaagggtctagagtgggtctcaagtattagtagtagtggtgggtctacatactacgcagactccgtgaagggccggttcaccatctcccgcgacaattccaagaacacgctgtatctgcaaatgaacagcctgcgtgccgaggacaccgcggtatattactgtgcgaaatcttttacgccttttgactactggggtcagggaaccctggtcaccgtctcgagc

SEQ ID NO: 1881 - DNA, 348 bp, Homo sapiens
gaggtgcagctgttggagtctgggggaggcttggtacagcctggggggtccctgcgtctctcctgtgcagcctccggattcacctttggtcattatgagatggattgggtccgccaggctccagggaagggtctagagtgggtctcaactatttctccgaatggtattactacatactacgcagactccgtgaagggccggttcaccatctcccgcgacaattccaagaacacgctgtatctgcaaatgaacagcctgcgtgccgaggacaccgcggtatattactgtgcgaaagcttcgtctggttttgactactggggtcagggaaccctggtcaccgtctcgagc

SEQ ID NO: 1882 - DNA, 348 bp, Homo sapiens
gaggtgcagctgttggagtctgggggaggcttggtacagcctggggggtccctgcgtctctcctgtgcagcctccggattcacctttccttcttatgagatggattgggtccgccaggctccagggaagggtctagagtgggtctcaagtattagtccgactggtgatcgtacatactacgcagactccgtgaagggccggttcaccatctcccgcgacaattccaagaacacgctgtatctgcaaatgaacagcctgcgtgccgaggataccgcggtatattactgtgcgaaatctggtactagttttgactactggggtcagggaaccctggtcaccgtctcgagc

SEQ ID NO: 1883 - DNA, 348 bp, Homo sapiens
gaggtgcagctgttggagtctgggggaggcttggtacagcctggggggtccctgcgtctctcctgtgcagcctccggattcacctttcgggattatgagatggattgggtccgccaggctccagggaagggtctagagtgggtctcaactatttccccgtcgggtaggtcgacatactacgcagactccgtgaagggccggttcaccatctcccgcgacaattccaagaacacgctgtatctgcaaatgaacagcctgcgtgccgaggacaccgcagtatattactgtgcgaaagcttatactgggtttaggtactggggtcagggaaccctggtcaccgtctcgagc

SEQ ID NO: 1884 - DNA, 324 bp, Homo sapiens
gacatccagatgacccagtctccatcctccctgtctgcatctgtaggagaccgtgtcaccatcacttgccgggcaagtaaggcgattatgggggatttagcttggtaccagcagaaaccagggaaagcccctaagctcctgatcggtggtgggtccgtgttgcaaagtggggtcccatcacgtttcagtggcagtggatctgggacagatttcactctcaccatcagcagtctgcaacctgaagattttgctacgtactactgtcggcagggggcgatgggttcttatacgttcggccaagggaccaaggtggaaatcaaacgg

SEQ ID NO: 1885 - DNA, 324 bp, Homo sapiens
gacatccagatgacccagtctccatcctccctgtctgcatctgtaggagaccgtgtcaccatcacttgccgggcaagtcattttattgctcatggtttatcttggtaccagcagaaaccagggaaagcccctaagctcctgatcagtggggtgtccgtgttgcaaagtggggtcccatcacgtttcagtggcagtggatctgggacagatttcactctcaccatcagcagtctgcaacctgaagattttgctacgtactactgtcggcagggggcgatgggttcttatacgttcggccaagggaccaaggtggaaatcaaacgg

SEQ ID NO: 1886 - DNA, 324 bp, Homo sapiens
gacatccagatgacccagtctccatcctccctgtctgcatctgtaggagaccgtgtcaccatcacttgccgggcaagttctccgattactgatggtttagcttggtaccagcagaaaccagggaaagcccctaagctcctgatcgatactggttcccgtttgcaaagtggggtcccatcacgtttcagtggcagtggatctgggacagatttcactctcaccatcagcagtctgcaacctgaagattttgctacgtactactgtcggcagggggcgatgggttcttatacgttcggccaagggaccaaggtggaaatcaaacgg

SEQ ID NO: 1887 - DNA, 324 bp, Homo sapiens
gacatccagatgacccagtctccatcctccctgtctgcatctgtaggagaccgtgtcaccatcacttgccgggcaagtagtgttattcttaatgagttacattggtaccagcagaaaccagggaaagcccctaagctcctgatctcggctgtgtcccgtttgcaaagtggggtcccatcacgtttcagtggcagtggatctgggacagatttcactctcaccatcagcagtctgcaacctgaagattttgctacgtactactgtcttcagacgttttgggggccttttacgttcggccaagggaccaaggtggaaatcaaacgg

SEQ ID NO: 1888 - DNA, 324 bp, Homo sapiens
gacatccagatgacccagtctccatcctccctgtctgcatctgtaggagaccgtgtcaccatcacttgccgggcaagtcagcctattgagaataagttaaagtggtatcagcagaaaccagggaaagcccctaagctcctgatctataagacgtcctatttgcaaagtggggtcccatcacgtttcagtggcagtggatctgggacagatttcactctcaccatcagcagtctgcaacctgaagattttgctacgtactactgtcaacagaatcggcagaggcctcatacgttcggccaaggaaccaaggtggaaatcaaacgg

SEQ ID NO: 1889 - DNA, 324 bp, Homo sapiens
gacatccagatgacccagtctccatcctccctgtctgcatctgtaggagaccgtgtcaccatcacttgccgggcaagtcaggggattcagaataatttaaattggtaccagcagaaaccagggaaagcccctaagctcctgatctatcggacttccaatctgcaaagtggggtcccatcacgtttcagtggcagtggatctgggacagatttcactctcaccatcagcagtctgcaacctgaagattttgctgcgtactactgtcaacagacgtctgctaggccttatacgttcggccaagggaccagggtgaaaatcaaacgg

SEQ ID NO: 1890 - DNA, 324 bp, Homo sapiens
gacatccagatgacccagtctccatcctccctgtctgcatctgtaggagaccgtgtcaccatcacttgccgtgcaagttcggtgattgaggatacgttatcgtggtaccagcagaaaccagggaaagcccctaagctcctgatctctgggccgtccgggttgcaaagtggggtcccatcacgtttcagtggcagtggatctgggacagatttcactctcaccatcagcagtctgcaacctgaagattttgctacgtactactgtcggcagggggcgatgggttcttatacgttcggccaagggaccaaggtggaaatcaaacgg

SEQ ID NO: 1891 - DNA, 324 bp, Homo sapiens
gacatccagatgacccagtctccatcctccctgtctgcatctgtaggagaccgtgtcaccatcacttgccgggcaagtagggagattattgagcctttagtttggtaccagcagaaaccagggaaagcccctaagctcctgatcggggtgtcgtccgctttgcaaagtggggtcccatcacgtttcagtggcagtggatctgggacagatttcactctcaccatcagcggtctgcaacctgaagattttgctacgtactactgtcggcagggggcgatgggttcttatacgttcggccaagggaccaaggtggaaatcaaacgg

SEQ ID NO: 1892 - DNA, 324 bp, Homo sapiens
gacatccagatgacccagtctccatcctccctgtctgcatctgtaggagaccgtgtcaccatcacttgccgggcaagtttggtgattgattctgagttagcttggtaccagcagaaaccagggaaagcccctaagctcctgatcgggggtgtgtccgggttgcaaagtggggtcccatcacgtttcagtggcagtggatctgggacagatttcactctcaccatcagcagtctgcaacctgaagattttgctacgtactactgtcggcagggggcgatgggttcttatacgttcggccaagggaccaaggtggaaatcaaacgg

SEQ ID NO: 1893 - DNA, 324 bp, Homo sapiens
gacatccagatgacccagtctccatcctccctgtctgcatctgtaggagaccgtgtcaccatcacttgccgggcaagtatgatgattgataaggagttagcgtggtaccagcagaaaccagggaaagcccctaagctcctgatcgttggggggtccggtttgcaaagtggggtcccatcacgtttcagtggcagtggatctgggacagatttcactctcaccatcagcagtctgcaacctgaagattttgctacgtactactgtcggcagggggcgatgggttcttatacgttcggccaagggaccaaggtggaaatcaaacgg

SEQ ID NO: 1894 - DNA, 324 bp, Homo sapiens
gacatccagatgacccagtctccatcctccctgtctgcatctgtaggagaccgtgtcaccatcacttgccgggcaagtattccgattaatgagcagttagtgtggtaccagcagaaaccagggaaagcccctatgctcctgatcgggggggggtccaggttgcaaagtggggtcccatcacgtttcagtggcagtggatctgggacagatttcactctcaccatcagcagtctgcaacctgaagattttgctacgtactactgtcggcagggtgcggtggggtcttatacgttcggccaagggaccaaggtggaaatcaaacgg

SEQ ID NO: 1895 - DNA, 324 bp, Homo sapiens
gacatccagatgacccagtctccatcctccctgtctgcatctgtaggagaccgtgtcaccatcacttgccgggcaagtcagagcattagcagctatttaaattggtaccagcagaaaccagggaaagcccctaagctcctgatctatgctgcatccagtttgcaaagtggggtcccatcacgtttcagtggcagtggatctgggacagatttcactctcaccatcagcagtctgcaacctgaagattttgctacgtactactgtcaacagagttacagtacccctaatacgttcggccaagggaccaaggtggaaatcaaacgg

SEQ ID NO: 1896 - DNA, 324 bp, Homo sapiens
gacatccagatgacccagtctccatcctccctgtctgcatctgtaggagaccgtgtcaccatcacttgccgggcaagtaatcagattcgtgagccgttatcttggtaccagcagaaaccagggaaagcccctaagctcctgatcgggggtggttcccgtttgcaaagtggggtcccatcacgtttcagtggcagtggatctgggacagatttcactctcaccatcagcagtctgcaacctgaagattttgctacgtactactgtcggcagggggcgatgggttcttatacgttcggccaagggaccaaggtggaaatcaaacgg

SEQ ID NO: 1897 - DNA, 324 bp, Homo sapiens
gacatccagatgacccagtctccatcctccctgtctgcatctgtaggagaccgtgtcaccatcacttgccgggcaagtaaggttattgctgatgatttagtttggtaccagcagaaaccagggaaagcccctaagctcctgatcggttctctgtccggtttgcaaagtggggtcccatcacgtttcagtggcagtggatctgggacagatttcactctcaccatcagcagtctgcaacctgaagattttgctacgtactactgtcggcagggggcgatgggttcttatacgttcggccaagggaccaaggtggaaatcaaacgg

SEQ ID NO: 1898 - DNA, 324 bp, Homo sapiens; identical to SEQ ID NO: 1891

SEQ ID NO: 1899 - DNA, 324 bp, Homo sapiens; identical to SEQ ID NO: 1893

SEQ ID NO: 1900 - DNA, 324 bp, Homo sapiens
gacatccagatgacccagtctccatcctccctgtctgcatctgtaggagaccgtgtcaccatcacttgccgggcaagtactactattgatacggagttatcgtggtaccagcagaaaccagggaaagcccctaagctcctgatctctggttattccgtgttgcaaagtggggtcccatcacgtttcagtggcagtggatctgggacagatttcactctcaccatcagcagtctgcaacctgaagattttgctacgtactactgtcggcagggggcgatgggttcttatacgttcggccaagggaccaaggtggaaatcaaacgg

SEQ ID NO: 1901 - DNA, 324 bp, Homo sapiens
gacatccagatgacccagtctccatcctccctgtctgcatctgtaggagaccgtgtcaccatcacttgccgggcaagtagttggattgctgatgatttaagttggtaccagcagaaaccagggaaagcccctaagctcctgatcggtggtgtgtccgggttgcaaagtggggtcccatcacgtttcagtggcagtggatctgggacagatttcactctcaccatcagcagtctgcaacctgaagattttgctacgtactactgtcggcagggtctgctggggtcttatacgttcggccaagggaccaaggtggaaatcaaacgg

SEQ ID NO: 1902 - DNA, 324 bp, Homo sapiens
gacatccagatgacccagtctccatcctccctgtctgcatctgtaggagaccgtgtcaccatcacttgccgggcaagtaggaatattgatgagaatttagattggtaccagcagaaaccagggaaagcccctaagctcctgatccggtggggttcccgtttgcaaagtggggtcccatcacgtttcagtggcagtggatctgggacagatttcactctcaccatcagcagtctgcaacctgaagattttgctacgtactactgtcgtcagggtctgtttggttcttggacgttcggccaagggaccaaggtggaaatcaaacgg

SEQ ID NO: 1903 - DNA, 324 bp, Homo sapiens
gacatccagatgacccagtctccatcctccctgtctgcatctgtaggagaccgtgtcaccatcacttgccgggcaagtcggtcgattgagggtgagttattttggtaccagcagaaaccagggaaagcccctaagctcctgatcaggggtgcgtccgtgttgcaaagtggggtcccatcacgtttcagtggcagtggatctgggacagatttcactctcaccatcagcagtctgcaacctgaagattttgctacgtactactgtcggcaggggaggtatggttcttttacgttcggccaagggaccaaggtggaaatcaaacgg

SEQ ID NO: 1904 - DNA, 324 bp, Homo sapiens
gacatccagatgacccagtctccatcctccctgtctgcatctgtaggagaccgtgtcaccatcacttgccgggcaagtcaggcgattccgtgggggttaaattggtaccagcagaaaccagggaaagcccctaagctcctgatctatgatgtttccagtttgcaaagtggggtcccatcacgtttcagtggcagtggatctgggacagatttcactctcaccatcagcagtctgcaacctgaagattttgctacgtactactgtcaacaggatattcatattcctatgacgttcggccaagggaccaaggtggaaatcaaacgg

SEQ ID NO: 1905 - DNA, 324 bp, Homo sapiens
gacatccagatgacccagtctccatcctccctgtctgcatctgtaggagaccgtgtcaccatcacttgccgggcaagtcagcatattggtcgttggttatcttggtaccagcagaaaccagggaaagcccctaagctcctgatctatagggcgtccacgttgcaaagtggggtcccatcacgtttcagtggcagtggatctgggacagatttcactctcaccatcagcagtctgcaacctgaagattttgctacgtactactgtcaacaggattttggtgatccttatacgttcggccaagggaccaaggtgggaatcaaacgg

SEQ ID NO: 1906 - DNA, 324 bp, Homo sapiens
gacatccagatgacccagtctccatcctccctgtctgcatctgtaggagaccgtgtcaccatcacttgccgggcaagtcagaatatttttgctgatttaaattggtatcagcagaaaccagggaaagcccctaagctcctgatctatatggggtcccgtttgcaaagtggggtcccatcacgtttcagtggcagtggatctgggacagatttcactctcaccatcagcagtctgcaacctgaagattttgctacgtactactgtcaacaggattataagtttccacttacgttcggccaagggaccaaggtggaaatcaaacgg

SEQ ID NO: 1907 - DNA, 324 bp, Homo sapiens
gacatccagatgacccagtctccatcctccctgtctgcatctgtaggagaccgtgtcaccatcacttgccgggcaagttcggatattgggcgtatgttatcttggtaccagcagaaaccagggaaagcccctaagctcctgatcgttggtggttcctcgttgcaaagtggggtcccatcacgtttcagtggcagtggatctgggacagatttcactctcaccatcagtagtctgcaacctgaagattttgctacgtactactgttggcagtgggctaagccgcctacgacgttcggccaagggaccaaggtggaaatcaaacgg

SEQ ID NO: 1908 - DNA, 324 bp, Homo sapiens; identical to SEQ ID NO: 1887

SEQ ID NO: 1909 - DNA, 324 bp, Homo sapiens; identical to SEQ ID NO: 1906

SEQ ID NO: 1910 - DNA, 324 bp, Homo sapiens; identical to SEQ ID NO: 1888

SEQ ID NO: 1911 - DNA, 324 bp, Homo sapiens
gacatccagatgacccagtctccatcctccctgtctgcatctgtaggagaccgtgtcaccatcacttgccgggcaagtcctaatattgctgtggatttagcttggtaccagcagaaaccagggaaagcccctaagctcctgatcaggggggtttcccgtttgcaaagtggggtcccatcacgtttcagtggcagtggatctgggacagatttcactctcaccatcagcagtctgcaacctgaagattttgctacgtactactgtcggcagggggcgatgggttcttatacgttcggccaagggaccaaggtggaaatcaaacgg

SEQ ID NO: 1912 - DNA, 324 bp, Homo sapiens
gacatccagatgacccagtctccatcctccctgtctgcatctgtaggagaccgtgtcaccatcacttgccgggcaagtcagaatattgctaagaagttagcgtggtaccagcagaaaccagggaaagcccctaagctcctgatcgttggtgcgtccttgttgcaaagtggggtcccatcacgtttcagtggcagtggatctgggacagatttcactctcaccatcagcagtctgcaacctgaagattttgctacgtactactgtcggcagggggcgatgggttcttatacgttcggccaagggaccaaggtggaaatcaaacgg

SEQ ID NO: 1913 - DNA, 324 bp, Homo sapiens
gacatccagatgacccagtctccatcctccctgtctgcatctgtaggagaccgtgtcaccatcacttgccgggcaagtcaggatattgatatgtatttaaattggtatcagcagaaaccggggaaagcccctaagctcctgatctatcgtggttcccaattgcaaagtcgggtcccatcacgtttcagtggcagtggatctgggacagatttcactctcaccatcagcagtctgcaacctgaagatttagctacgtactactgtcaacagttggcgtcgtatcctgtgacgttcggccaagggaccaaggtggaaatcaaacgg

SEQ ID NO: 1914 - DNA, 324 bp, Homo sapiens
gacatccagatgacccagtctccatcctccctgtctgcatctgtaggagaccgtgtcaccatcacttgccgggcaagtcagagcattagcagctatttaaattggtaccagcagaaaccagggcaagcccctaagctcctgatcgcggctgcgtcctttttgcaaagtggggtcccatcacgtttcagtggcagtggatctgggacagatttcactctcaccatcagcagtctgcaacctgaagattttgctacgtactactgtgggcagggtgcgcggggtcctacgacgttcggccaagggaccagggtggaaatcaaacgg

SEQ ID NO: 1915 - DNA, 324 bp, Homo sapiens
gacatccagatgacccagtctccatcctccctgtctgcatctgtaggagaccgtgtcaccatcacttgccgggcaagtagtgttattcttaatgagttacattggtaccagcagaaaccagggaaagcccctaagctcctgatctcggctgtgtcccgtttgcaaagtggggtcccatcacgtttcagtggcagtggatctgggacagatttcactctcaccatcagcagtctgcaacctgaagattttgctacgtactactgtcttcagacgttttgggggccttatacgttcggccaagggaccaaggtggaaatcaaacgg

SEQ ID NO: 1916 - DNA, 21 bp, Artificial Sequence
  Primer
caggaaacagctatgaccatg

SEQ ID NO: 1917 - DNA, 20 bp, Artificial Sequence
  Primer
ttgtaaaacgacggccagtg

SEQ ID NO: 1918 - DNA, 348 bp, Homo sapiens
gaggtgcagctgttggagtctgggggaggcttggtacagcctggggggtccctgcgtctctcctgtgcagcctccggattcacctttgatagggaggagatggattgggtccgccaggctccagggaagggtctagagtgggtctcaactatttcgccgtcgggtaggaagacatactacgcagactccgtgaagggccggttcaccatctcccgcgacaattccaagaacacgctgtatctgcaaatgaacagcctgcgtgccgaggacaccgcggtatattactgtgcgaaagcttatactgggtttgactactggggtcagggaaccctggtcaccgtctcgagc

SEQ ID NO: 1919 - DNA, 348 bp, Homo sapiens
gaggtgcagctgttggagtctgggggaggcttggtacagcctggggggtccctgcgtctctcctgtgcagcctccggattcacctttcgggattatgagatggattgggtccgccaggctccagggaagggtctggagtgggtctcaacgatttctgctgatggtagggagacatactacgcagactccgtgaagggccggttcaccatctcacgcgacaattccaagaacacgctgtatctgcaaatgaacagcctgcgtgccgaggataccgcggtatattactgtgcgaaagcgtatacgtcgtttgactactggggtcagggaaccctggtcaccgtctcgagc

SEQ ID NO: 1920 - DNA, 348 bp, Homo sapiens
gaggtgcagctgttggagtctgggggaggcttggtacagcctggggggtccctgcgtctctcctgtgcagcctccggattcacctttaaggggagtgagatggattgggtccgccaggctccagggaagggtctggagtgggtctcaacgatttctgctgatggtagggagacatactacgcagactccgtgaagggccggttcaccatctcccgcgacaattccaagaacacgctgtatctgcaaatgaacagcctgcgtgccgaggataccgcggtatattactgtgcgaaagcgtatacgtcgtttgactactggggtcagggaaccctggtcaccgtctcgagc

SEQ ID NO: 1921 - DNA, 45 bp, Artificial Sequence
  Primer
  variation 22, 23, 28, 29: n = A,T,C or G
  misc_feature 22, 23, 28, 29: n = A,T,C or G
ctagagtgggtctcatctattnnsggtnnsggtggtagcacatac

SEQ ID NO: 1922 - DNA, 49 bp, Artificial Sequence
  Primer
  variation 22, 23, 31, 32: n = A,T,C or G
  misc_feature 22, 23, 31, 32: n = A,T,C or G
ctagagtgggtctcatctattnnsggtagtnnsggtagcacatactacg

SEQ ID NO: 1923 - DNA, 54 bp, Artificial Sequence
  Primer
  variation 22, 23, 37, 38: n = A,T,C or G
  misc_feature 22, 23, 37, 38: n = A,T,C or G
ctagagtgggtctcatctattnnsggtagtggtggtnnsacatactacgcagac

SEQ ID NO: 1924 - DNA, 58 bp, Artificial Sequence
  Primer
  misc_feature 22, 23, 43, 44: n = A,T,C or G
ctagagtgggtctcatctattnnsggtagtggtggtagcacannstacgcagactccg

SEQ ID NO: 1925 - DNA, 21 bp, Artificial Sequence
  Primer
aatagatgagacccactctag

SEQ ID NO: 1926 - DNA, 42 bp, Artificial Sequence
  Primer
  misc_feature 21, 22, 24, 25: n = A,T,C or G
gggtctcatctattagtggtnnsnnsggtagcacatactacg

SEQ ID NO: 1927 - DNA, 45 bp, Artificial Sequence
  Primer
  misc_feature 21, 22, 30, 31: n = A,T,C or G
gggtctcatctattagtggtnnsggtggtnnsacatactacgcag

SEQ ID NO: 1928 - DNA, 51 bp, Artificial Sequence
  Primer
  misc_feature 21, 22, 36, 37: n = A,T,C or G
gggtctcatctattagtggtnnsggtggtagcacannstacgcagactccg

SEQ ID NO: 1929 - DNA, 45 bp, Artificial Sequence
  Primer
  misc_feature 24, 25, 30, 31: n = A,T,C or G
gggtctcatctattagtggtagtnnsggtnnsacatactacgcag

SEQ ID NO: 1930 - DNA, 51 bp, Artificial Sequence
  Primer
  misc_feature 24, 25, 36, 37: n = A,T,C or G
gggtctcatctattagtggtagtnnsggtagcacannstacgcagactccg

SEQ ID NO: 1931 - DNA, 51 bp, Artificial Sequence
  Primer
  misc_feature 30, 31, 36, 37: n = A,T,C or G
gggtctcatctattagtggtagtggtggtnnsacannstacgcagactccg

SEQ ID NO: 1932 - DNA, 20 bp, Artificial Sequence
  Primer
accactaatagatgagaccc

SEQ ID NO: 1933 - DNA, 48 bp, Artificial Sequence
  Primer
  misc_feature 23, 24, 32, 33: n = A,T,C or G
atattactgtgcgaaagcttatnnsgggtttnnstactggggtcaggg

SEQ ID NO: 1934 - DNA, 48 bp, Artificial Sequence
  Primer
  misc_feature 23, 24, 26, 27: n = A,T,C or G
atattactgtgcgaaagcttatnnsnnstttgactactggggtcaggg

SEQ ID NO: 1935 - DNA, 48 bp, Artificial Sequence
  Primer
  misc_feature 26, 27, 32, 33: n = A,T,C or G
atattactgtgcgaaagcttatactnnstttnnstactggggtcaggg

SEQ ID NO: 1936 - DNA, 24 bp, Artificial Sequence
  Primer
ataagctttcgcacagtaatatac

SEQ ID NO: 1937 - DNA, 46 bp, Artificial Sequence
  Primer
  misc_feature 25, 26: n = A,T,C or G
gcagcctccggattcacctttgatnnsgaggagatggattgggtcc

SEQ ID NO: 1938 - DNA, 46 bp, Artificial Sequence
  Primer
  misc_feature 21, 22: n = A,T,C or G
ggacccaatccatctcctcsnnatcaaaggtgaatccggaggctgc

SEQ ID NO: 1939 - DNA, 43 bp, Artificial Sequence
  Primer
  misc_feature 20, 21, 26, 27: n = A,T,C or G
agagtgggtctcaactattnnsccgnnsggtaggaagacatac

SEQ ID NO: 1940 - DNA, 46 bp, Artificial Sequence
  Primer
  misc_feature 20, 21, 29, 30: n = A,T,C or G
agagtgggtctcaactattnnsccgtcgnnsaggaagacatactac

SEQ ID NO: 1941 - DNA, 50 bp, Artificial Sequence
  Primer
  misc_feature 20, 21, 35, 36: n = A,T,C or G
agagtgggtctcaactattnnsccgtcgggtaggnnsacatactacgcag

SEQ ID NO: 1942 - DNA, 56 bp, Artificial Sequence
  Primer
  misc_feature 20, 21, 41, 42: n = A,T,C or G
agagtgggtctcaactattnnsccgtcgggtaggaagacannstacgcagactccg

SEQ ID NO: 1943 - DNA, 21 bp, Artificial Sequence
  Primer
aatagttgagacccactctag

SEQ ID NO: 1944 - DNA, 51 bp, Artificial Sequence
  Primer
  misc_feature 21, 22, 24, 25: n = A,T,C or G
gggtctcaactatttcgccgnnsnnsaggaagacatactacgcagactccg

SEQ ID NO: 1945 - DNA, 51 bp, Artificial Sequence
  Primer
  misc_feature 21, 22, 30, 31: n = A,T,C or G
gggtctcaactatttcgccgnnsggtaggnnsacatactacgcagactccg

SEQ ID NO: 1946 - DNA, 51 bp, Artificial Sequence
  Primer
  misc_feature 21, 22, 36, 37: n = A,T,C or G
gggtctcaactatttcgccgnnsggtaggaagacannstacgcagactccg

SEQ ID NO: 1947 - DNA, 51 bp, Artificial Sequence
  Primer
  misc_feature 24, 25, 30, 31: n = A,T,C or G
gggtctcaactatttcgccgtcgnnsaggnnsacatactacgcagactccg

SEQ ID NO: 1948 - DNA, 51 bp, Artificial Sequence
  Primer
  misc_feature 24, 25, 36, 37: n = A,T,C or G
gggtctcaactatttcgccgtcgnnsaggaagacannstacgcagactccg

SEQ ID NO: 1949 - DNA, 51 bp, Artificial Sequence
  Primer
  misc_feature 30, 31, 36, 37: n = A,T,C or G
gggtctcaactatttcgccgtcgggtaggnnsacannstacgcagactccg

SEQ ID NO: 1950 - DNA, 20 bp, Artificial Sequence
  Primer
cggcgaaatagttgagaccc

SEQ ID NO: 1951 - DNA, 20 bp, Artificial Sequence
  Primer
ttcaggctgcgcaactgttg

SEQ ID NO: 1952 - DNA, 22 bp, Artificial Sequence
  Primer
cgccaagcttgcatgcaaattc

SEQ ID NO: 1953 - DNA, 48 bp, Artificial Sequence
  Primer
  misc_feature 23, 24, 32, 33: n = A,T,C or G
atattactgtgcgaaacatgggnnsggttttnnstactggggtcaggg

SEQ ID NO: 1954 - DNA, 44 bp, Artificial Sequence
  Primer
  misc_feature 23, 24, 26, 27: n = A,T,C or G
atattactgtgcgaaacatgggnnsnnstttgactactggggtc

SEQ ID NO: 1955 - DNA, 48 bp, Artificial Sequence
  Primer
  misc_feature 26, 27, 32, 33: n = A,T,C or G
atattactgtgcgaaacatgggactnnstttnnstactggggtcaggg

SEQ ID NO: 1956 - DNA, 24 bp, Artificial Sequence
  Primer
cccatgtttcgcacagtaatatac

SEQ ID NO: 1957 - DNA, 38 bp, Artificial Sequence
  Primer
  misc_feature 19, 20: n = A,T,C or G
gcctccggattcacctttnnsgattatgagatggattg

SEQ ID NO: 1958 - DNA, 38 bp, Artificial Sequence
  Primer
  misc_feature 19, 20: n = A,T,C or G
caatccatctcataatcsnnaaaggtgaatccggaggc

SEQ ID NO: 1959 - DNA, 46 bp, Artificial Sequence
  Primer
  misc_feature 20, 21, 26, 27: n = A,T,C or G
agagtgggtctcaagtattnnsccgnnsggttcggagacatactac

SEQ ID NO: 1960 - DNA, 50 bp, Artificial Sequence
  Primer
  misc_feature 20, 21, 29, 30: n = A,T,C or G
agagtgggtctcaagtattnnsccgtctnnstcggagacatactacgcag

SEQ ID NO: 1961 - DNA, 52 bp, Artificial Sequence
  Primer
  misc_feature 20, 21, 35, 36: n = A,T,C or G
agagtgggtctcaagtattnnsccgtctggttcgnnsacatactacgcagac

SEQ ID NO: 1962 - DNA, 55 bp, Artificial Sequence
  Primer
  misc_feature 20, 21, 41, 42: n = A,T,C or G
agagtgggtctcaagtattnnsccgtctggttcggagacannstacgcagactcc

SEQ ID NO: 1963 - DNA, 21 bp, Artificial Sequence
  Primer
aatacttgagacccactctag

SEQ ID NO: 1964 - DNA, 45 bp, Artificial Sequence
  Primer
  misc_feature 21, 22, 24, 25: n = A,T,C or G
gggtctcaagtattggtccgnnsnnstcggagacatactacgcag

SEQ ID NO: 1965 - DNA, 47 bp, Artificial Sequence
  Primer
  misc_feature 21, 22, 30, 31: n = A,T,C or G
gggtctcaagtattggtccgnnsggttcgnnsacatactacgcagac

SEQ ID NO: 1966 - DNA, 51 bp, Artificial Sequence
  Primer
  misc_feature 21, 22, 36, 37: n = A,T,C or G
gggtctcaagtattggtccgnnsggttcggagacannstacgcagactccg

SEQ ID NO: 1967 - DNA, 47 bp, Artificial Sequence
  Primer
  misc_feature 24, 25, 30, 31: n = A,T,C or G
gggtctcaagtattggtccgtctnnstcgnnsacatactacgcagac

SEQ ID NO: 1968 - DNA, 51 bp, Artificial Sequence
  Primer
  misc_feature 24, 25, 36, 37: n = A,T,C or G
gggtctcaagtattggtccgtctnnstcggagacannstacgcagactccg

SEQ ID NO: 1969 - DNA, 51 bp, Artificial Sequence
  Primer
  misc_feature 30, 31, 36, 37: n = A,T,C or G
gggtctcaagtattggtccgtctggttcgnnsacannstacgcagactccg

SEQ ID NO: 1970 - DNA, 20 bp, Artificial Sequence
  Primer
gggtctcaagtattggtccg

SEQ ID NO: 1971 - DNA, 48 bp, Artificial Sequence
  Primer
  misc_feature 23, 24, 32, 33: n = A,T,C or G
atattactgtgcgaaagcgtatnnstcgtttnnstactggggtcaggg

SEQ ID NO: 1972 - DNA, 44 bp, Artificial Sequence
  Primer
  misc_feature 23, 24, 26, 27: n = A,T,C or G
atattactgtgcgaaagcgtatnnsnnstttgactactggggtc

SEQ ID NO: 1973 - DNA, 48 bp, Artificial Sequence
  Primer
  misc_feature 26, 27, 32, 33: n = A,T,C or G
atattactgtgcgaaagcgtatacgnnstttnnstactggggtcaggg

SEQ ID NO: 1974 - DNA, 24 bp, Artificial Sequence
  Primer
atacgctttcgcacagtaatatac

SEQ ID NO: 1975 - DNA, 29 bp, Artificial Sequence
  Primer
ccaagaacacgctgtatctgcaaatgaac

SEQ ID NO: 1976 - DNA, 29 bp, Artificial Sequence
  Primer
gttcatttgcagatacagcgtgttcttgg

SEQ ID NO: 1977 - DNA, 34 bp, Artificial Sequence
  Primer
ccaagtcgacggaggtgcagctgttggagtctgg

SEQ ID NO: 1978 - DNA, 29 bp, Artificial Sequence
  Primer
ccaaccaagcggccgcgctcgagacggtg

SEQ ID NO: 1979 - DNA, 348 bp, Homo sapiens
gaggtgcagctgttggagtctgggggaggcttggtacagcctggggggtccctgcgtctctcctgtgcagcctccggattcacctttgattcttatgagatggattgggtccgccaggctccagggaagggtctagagtgggtctcaactatttcgccgtcgggtaggaagacatactacgcagactccgtgaagggccggttcaccatctcccgcgacaattccaagaacacgctgtatctgcaaatgaacagcctgcgtgccaaggacaccgcggtatattactgtgcgaaagctgggacttcttttgactactggggtcagggaaccctggtcaccgtctcgagc

SEQ ID NO: 1980 - DNA, 348 bp, Homo sapiens; identical to SEQ ID NO: 1920

SEQ ID NO: 1981 - DNA, 348 bp, Homo sapiens
gaggtgcagctgttggagtctgggggaggcttggtacagcctggggggtccctgcgtctctcctgtgcagcctccggattcacctttagttcgtatgagatggattgggtccgccgggctccagggaagggtctagagtgggtctcaacgatttctgctgatggtagggagacatactacgcagactccgtgaagggccggttcaccatctcccgcgacaattccaagaacacgctgtatctgcaaatgaacagcctgcgtgccggggacaccgcggtatattactgtgcgaaagcttttgatgcttttgaccactggggtcagggaaccctggtcaccgtctcaagc

SEQ ID NO: 1982 - DNA, 348 bp, Homo sapiens
gaggtgcagctgttggagtctgggggaggcttggtacagcctggggggtccctgcgtctctcctgtgcagcctccggattcacctttgagctgggggagatggattgggtccgccaggctccagggaagggtctagagtgggtctcatctattagtggtagtggtggtagcacatactacgcagactccgtgaagggccggttcaccatctcccgcgacaattccaagaacacgctgtatctgcaaatgaacagcctgcgtgccgaggacaccgcggtatattactgtgcgaaagcttatactgggtttgactactggggtcagggaaccctggtcaccgtctcgagc

SEQ ID NO: 1983 - DNA, 348 bp, Homo sapiens
gaggtgcagctgttggagtctgggggaggcttggtacagcctggggggtccctgcgtctctcctgtgcagcctccggattcacctttgagctggaggagatggattgggtccgccaggctccagggaagggtctagagtgggtctcatctattagtggtagtggtggtagcacatactacgcagactccgtgaagggccggttcaccacctcccgcgacaattccaagaacacgctgtatctgcaaatgaacagcctgcgtgccgaggacaccgcggtatattactgtgcgaaagcttatactgggtttgactactggggtcagggaaccctggtcaccgtctcgagc

SEQ ID NO: 1984 - DNA, 348 bp, Homo sapiens
gaggtgcagctgttggagtctgggggaggcttggtacagcctggggggtccctgcgtctctcctgtgcagcctccggattcacctttgatagggaggagatggattgggtccgccaggctccagggaagggtctagagtgggtctcaactatttcgccgtcgggtaggaagacatactacgcagactccgtgaagggccggttcaccatctcccgcgacaattccaagaacacgctgtatctgcaaatgaacagcctgcgtgccgaggacaccgcggtatattactgtgcgaaagcgtatgatccgtttgactactggggtcagggaaccctggtcaccgtctcgagc

SEQ ID NO: 1985 - DNA, 348 bp, Homo sapiens
gaggtgcagctgttggagtctgggggaggcttggtacagcctggggggtccctgcgtctctcctgtgcagcctccggattcacctttgatagggaggagatggattgggtccgccaggctccagggaagggtctagagtgggtctcaactatttcgccgtcgggtaggaagacatactacgcagactccgtgaagggccggttcaccatctcccgcgacaattccaagaacacgctgtatctgcaaatgaacagcctgcgtgccgaggacaccgcggtatattactgtgcgaaacaagggactggttttgactactggggtcagggaaccctggtcaccgtctcgagc

SEQ ID NO: 1986 - DNA, 348 bp, Homo sapiens
gaggtgcagctgttggagtctgggggaggcttggtacagcctggggggtccctgcgtctctcctgtgcagcctccggattcacctttcgggattatgagatggattgggtccgccaggctccagggaagggtctagagtgggtctcaagtattggtccgtctggttcggagacatactacgcagactccgtgaagggccggttcaccatctcccgcgacaattccacgaacacgctgtatctgcaaatgaacagcctgcgtgccgaggacaccgcggtatattactgtgcgaaatcgtatacttcttttgactactggggtcagggaaccctggtcaccgtctcgagc

SEQ ID NO: 1987 - DNA, 348 bp, Homo sapiens
gagttgcagctgttggagtctgggggaggcttggtacagcctggggggtccctgcgtctctcctgtgcagcctccggattcacctttcgggattatgagatggattgggtccgccaggctccagggaagggtctagagtgggtctcaagtattggtccgtctggttcggagacatactacgcagactccgtgaagggccggttcaccatctcccgcgacaattccaagaacacgctgtatctgcaaatgaacagcctgcgtgccgaggataccgcggtatattactgtgcgaaagcgtatacgtcgtttgactactggggtcagggaaccctggtcaccgtctcgagc

SEQ ID NO: 1988 - DNA, 348 bp, Homo sapiens
gaggtgcagctgttggagtctgggggaggcttggtacagcctggggggtccctgcgtctctcctgtgcagcctccggattcacctttagttcgtatgagatggattgggtccgccaggctccagggaagggtctagagtgggtctcaactatttcggcggatggtgttacgacatactacacagactccgtgaagggccggttcaccatctcccgcgacaattccaagaacacgctgtatctgcaaatgaacagcctgcgtgccgaggataccgcggtatattactgtgcgaaagcttttgatgcttttgactactggggtcagggaaccctggtcaccgtctcgagc

SEQ ID NO: 1989 - DNA, 348 bp, Homo sapiens
gaggtgcagctgttggagtctgggggaggcttggtacagcctggggggtccctgcgtctctcctgtgcagcctccggattcacctttgatagggaggagatggattgggtccgccaggctccagggaagggtctagagtgggtctcaactatttcgccgaggggtagggggacatactacgcagactccgtgaagggccggttcaccatctcccgcgacaattccaagaacacgctgtatctgcaaatgaacagcctgcgtgccgaggataccgcggtatattactgtgcgaaagcgtatacggggtttaggtactggggtcagggaaccctggtcaccgtctcgagc

SEQ ID NO: 1990 - DNA, 348 bp, Homo sapiens
gaggtgcagctgttggagtctgggggaggcttggtacagcctggggggtccctgcgtctctcctgtgcagcctccggattcacctttgatagggaggagatggattgggtccgccaggctccagggaagggtctagagtgggtctcaactatttcgccgttgggtaggtccacatactacgcagactccgtgaagggccggttcaccatctcccgcgacaattccaagaacacgctgtatctgcaaatgaacagcctgcgtgccgaggacaccgcggtatattactgtgcgaaagcttatactggctttcgctactggggtcagggaaccctggtcaccgtctcgagc

SEQ ID NO: 1991 - DNA, 348 bp, Homo sapiens
gaggtgcagctgttggagtctgggggaggcttggtacagcctggggggtccctgcgtctctcctgtgcagcctccggattcacctttcgggattatgagatggattgggtccgccaggctccagggaagggtctagagtgggtctcaagtattggtccgtctggttcggagacatactacgcagactccgtgaagggccggttcaccatctcccgcgacaattccaagaacacgctgtatctgcaaatgaacagcctgcgtgccgaggataccgcggtatattactgtgcgaaagcgtatacggggtttgggtactggggtcagggaaccctggtcaccgtctcgagc

SEQ ID NO: 1992 - DNA, 348 bp, Homo sapiens; identical to SEQ ID NO: 1849

SEQ ID NO: 1993 - DNA, 348 bp, Homo sapiens
gaggtgcagctgttggagtctgggggaggcttggtacagcctggggggtccctgcgtctctcctgtgcagcctccggattcacctttcgggattatgagatggattgggtccgccaggctccagggaagggtcgagagtgggtctcaagtattgggccggggggttcggagacatactacgcagactccgtgaagggccggttcaccatctcccgcgacaattccaagaacacgctgtatctgcaaatgaacagcctgcgtgccgaggataccgcggtatattactgtgcgaaagcgtatacggggtttaagtactggggtcagggaaccctggtcaccgtctcgagc

SEQ ID NO: 1994 - DNA, 348 bp, Homo sapiens
gaggtgcagctgttggagtctgggggaggcttggtacagcctggggggtccctgcgtctctcctgtgcagcctccggattcacctttcgggattatgagatggattgggtccgccaggctccagggaagggtctagagtgggtctcaactattcacccgtcgggtaggaagacatactacgcagactccgtgaagggccggttcaccatctcccgcgacaatttcaagaacacgctgtatctgcaaatgaacagcctgcgtgccgaggacaccgcggtatattactgtgcgaaagcttatactgggtttgggtactggggtcagggaaccctggtcaccgtctcgagc

SEQ ID NO: 1995 - DNA, 348 bp, Homo sapiens
gaggtgcagctgttggagtctgggggaggcttggtacagcctggggggtccctgcgtctctcctgtgcagcctccggattcacctttcgggattatgagatggattgggtccgccaggctccagggaagggtctagagtgggtctcaagtattagtccgaacggttcggagacaaactacgcagactccgtgaagggccggttcaccatctcccgcgacaattccaagaacacgctgtatctgcaaatgaacagcctgcgtgccgaggataccgcggtatattactgtgcgaaagcgtatacgtcgtttgactactggggtcagggaaccctggtcaccgtctcgagc

SEQ ID NO: 1996 - DNA, 348 bp, Homo sapiens
gaggtgcagctgttggagtctgggggaggcttggtacagcctggggggtccctgcgtctctcctgtgcagcctccggattcacctttcgggattatgagatggattgggtccgccaggctccagggaagggtcgagagtgggtctcaagtattgggccgtctggttcggagacatggtacgcagactccgtgaagggccggttcaccatctcccgcgacaattccaagaacacgctgtatctgcaaatgaacagcctgcgtgccgaggataccgcggtatattactgtgcgaaagcgtatacggggtttgggtactggggtcagggaaccctggtcaccgtctcaagc

SEQ ID NO: 1997 - DNA, 348 bp, Homo sapiens
gaggtgcagctgttggagtctgggggaggcttggtacagcctggggggtccctgcgtctctcctgtgcagcctccggattcacctttcgggattatgagatggattgggtccgccaggctccagggaagggtctagagtgggtctcaagtattgggccgtctggttcggagacatggtacgcagactccgtgaagggccggttcaccatctcccgcgacaattccaagaacacgctgtatctgcaaatgaacagcctgcgtgccgaggataccgcggtatattactgtgcgaaagcgtatacggggtttgggtactggggtcagggaaccctggtcaccgtctcgagc

SEQ ID NO: 1998 - DNA, 348 bp, Homo sapiens; identical to SEQ ID NO: 1851

SEQ ID NO: 1999 - DNA, 348 bp, Homo sapiens
gaggtgcagctgttggagtctgggggaggcttggtacagcctggggggtccctgcgtctctcctgtgcagcctccggattcacctttgatagggaggagatggattgggtccgccaggctccagggaagggtctagagtgggtctcaactatttcgccgggggggaggaagacatactacgcagactccgtgaagggccggttcaccatctcccgcgacaattccaagaacacgctgtatctgcaaatgaacagcctgcgtgccgaggacaccgcggtatattactgtgcgaaagcttatacggggtttaggtactggggtcagggaaccctggtcaccgtctcgagc

SEQ ID NO: 2000 - DNA, 348 bp, Homo sapiens; identical to SEQ ID NO: 1999

SEQ ID NO: 2001 - DNA, 348 bp, Homo sapiens
gaggtgcagctgttgcagtctgggggaggcttggtacagcctggggggtccctgcgtctctcctgtgcagcctccggattcacctttgatagggaggagatggattgggtccgccaggctccagggaagggtctagagtgggtctcaactatttcgccgaacggtaggacgacatactacgcagactccgtaaagggccggttcaccatctcccgcgacaattccaagaacacgctgtatctgcaaatgaacagcctgcgtgccgaggacaccgcggtatattactgtgcgaaagcttatacggggtttaggtactggggtcagggaaccctggtcaccgtctcgagc

SEQ ID NO: 2002 - DNA, 348 bp, Homo sapiens
gaggtgcagctgttggagtctgggggaggcttggtacagcctggggggtccctgcgtctctcctgtgcagcctccggattcacctttgatagggaggagatggattgggtccgccaggctccagggaagggtctagagtgggtctcaactatttcgccgaacggtaggaagacatactacgcagactccgtgaagggccggttcaccatctcccgcgacaattccaagaacacgctgtatctgcaaatgaacagcctgcgtgccgaggacaccgcggtatattactgtgcgaaagcttatactgggtttaggtactggggtcagggaaccctggtcaccgtctcgagc

SEQ ID NO: 2003 - DNA, 348 bp, Homo sapiens; identical to SEQ ID NO: 1850

SEQ ID NO: 2004 - DNA, 348 bp, Homo sapiens
gaggtgcagctgttggagtctgggggaggcttggtacagcctggggggtccctgcgtctctcctgtgcagcctccggattcacctttgatagggaggagatggattgggtccgccaggctccagggaagggtctagagtgggtctcaactatttcgccgtcggggaggaagacatggtacgcagactccgtgaagggccggttcaccatctcccgcgacaattccaagaacacgctgtatctgcaaatgaacagcctgcgtgccaaggacaccgcggtatattactgtgcgaaagcttatactggctttaggtactggggtcagggaaccctggtcaccgtctcgagc

SEQ ID NO: 2005 - DNA, 348 bp, Homo sapiens
gaggtgcagctgttggagtctgggggaggcttggtacagcctggggggtccctgcgtctctcctgtgcagcctccggattcacctttgatagggaggagatggattgggtccgccaggctccagggaagggtctagagtgggtctcaactatttcgccggccgggagggggacatactacgcagactccgtgaagggccggttcaccatctcccgcgacaattccaagaacacgctgtatctgcaaatgaacggcctgcgtgccgaggacaccgcggtatattactgtgcgaaagcttatactgggtttgggtactggggtcagggaaccctggtcaccgtctcgagc

SEQ ID NO: 2006 - DNA, 348 bp, Homo sapiens; identical to SEQ ID NO: 1989

SEQ ID NO: 2007 - DNA, 348 bp, Homo sapiens; identical to SEQ ID NO: 1850

SEQ ID NO: 2008 - DNA, 348 bp, Homo sapiens; identical to SEQ ID NO: 1883

SEQ ID NO: 2009 - DNA, 348 bp, Homo sapiens
gaggtgcagctgttggagtctgggggaggcttggtacagcctggggggtccatgcgtctctcctgtgcagcctccggattcacctttcgggattatgagatggattgggtccgccaggctccagggaagggtcgagagtgggtctcaagtattgggccgtctggttcggagacatggtacgcagactccgtgaagggccggttcaccatctcccgcgacaattccaagaacacgctgtatctgcaaatgaacagcctgcgtgccgaggataccgcggtatattactgtgcgaaagcttatactgggtttgggtactggggtcagggaaccctggtcaccgtctcgagc

SEQ ID NO: 2010 - DNA, 348 bp, Homo sapiens
gaggtgcagctgttggagtctgggggaggcttggtacagcctggggggtccctgcgtctctcctgtgcagcctccggattcacctttgatagggaggagatggattgggtccgccaggctccagggaagggtcgagagtgggtctcaactatttcgccgtcggggaggaagacatggtacgcagactccgtgaagggccggttcaccatctcccgcgacaattccaagaacacgctgtatctgcaaatgaacggcctgcgtgccgaggacaccgcggtatattactgtgcgaaagcttatactgggtttaggtactggggtcagggaaccctggtcaccgtctcgagc

SEQ ID NO: 2011 - DNA, 348 bp, Homo sapiens; identical to SEQ ID NO: 1852

SEQ ID NO: 2012 - DNA, 348 bp, Homo sapiens
gaggtgcagctgttggagtctgggggaggcttggtacagcctggggggtccctgcgtctctcctgtgcagcctccggattcacctttcgggattatgagatggattgggtccgccaggccccagggaagggtcgagagtgggtctcaagtattgggccgtctggttcggagacatggtacgcagactccgtgaagggccggttcaccatctcccgcgacaattccaagaacacgctgtatctgcaaatgaacagcctgcgtgccgaggataccgcggtatattactgtgcgaaagcgtatacggggtttgggtactggggtcagggaaccctggtcaccgtctcgagc

SEQ ID NO: 2013 - DNA, 348 bp, Homo sapiens
gaggtgcagctgttggagtctgggggaggcttggtacagcctggggggtccctgcgtctctcctgtgcagcctccggattcacctttcgggattatgagatggattgggtccgccaggctccagggaagggtctagagtgggtctcaactattagcccgtcgggtaggcggacatactacgcagactccgtgaagggccggttcaccatctcccgcgacaattccaagaacacgctgtatctgcaaatgaacagcctgcgtgccgaggataccgcggtatattactgtgcgaaagcgtatacggggtttcactactggggtcagggaaccctggtcaccgtctcgagc

SEQ ID NO: 2014 - DNA, 348 bp, Homo sapiens; identical to SEQ ID NO: 1852

SEQ ID NO: 2015 - DNA, 3998 bp, Artificial Sequence
  Vector
ggtgatgacggtgaaaacctctgacacatgcagctcccggagacggtcacagcttgtctgtaagcggatgccgggagcagacaagcccgtcagggcgcgtcagcgggtgttggcgggtgtcggggctggcttaactatgcggcatcagagcagattgtactgagagtgcaccatatatgcggtgtgaaataccgcacagatgcgtaaggagaaaataccgcatcaggcgccattcgccattcaggctgcgcaactgttgggaagggcgatcggtgcgggcctcttcgctattacgccagctggcgaaagggggatgtgctgcaaggcgattaagttgggtaacgccagggttttcccagtcacgacgttgtaaaacgacggccagtgccaagcttgcatgcaaggagatggcgcccaacagtcccccggccacggggcctgccaccatacccacgccgaaacaagcgctcatgagcccgaagtggcgagcccgatcttccccatcggtgatgtcggcgatataggcgccagcaaccgcacctgtggcgccggtgatgccggccacgatgcgtccggcgtagaggatcgagatccatagtagagtgcttctatcatagatcctccgtttcgtgatgagtatagtagagtgcttctatcatagatctcgatcccgcgaaattaatacgactcactatagggagaccacaacggtttccctctagaaataattttgtttaactttaagaaggagatataccatggggtcgaccggcggcgcggccgcaggatctggtggcggatcaggcggtggacatatgaaaggaatgagcaaaatgccgcagttcaatttgcggtggcctagagaagtattggatttggtacgcaaggtagcggaagagaatggtcggtctgttaattctgagatttatcagcgagtaatggaaagctttaagaaggaagggcgcattggcgccggtggcggatcaggcggtggatctggtggcggatcaggcggtggacatatgaaaggaatgagcaaaatgccgcagttcaatttgcggtggcctagagaagtattggatttggtacgcaaggtagcggaagagaatggtcggtctgttaattctgagatttatcagcgagtaatggaaagctttaagaaggaagggcgcattggcgccggtggcggatcaggcggtggatcctatccgtatgatgtgccggattatgcgtaactcgagagatccggtaacgatccggctgctaaaaagcccgaaaggaagctgagttggctgctgccaccgctgagcaataactagcataaccccttggggcctctaaacgggtcttgaggggttttttgctgaaaggaggaactatatccggatatccacaggacgggtgtggtcgccatgatcgcgtagtcgatagtggctccaagtagcgaagcgagcaggactgggcggcggccaaagcggtcggacagtgctccgagaacgggtgcgcatagaaattgcatcaacgcatatagcgctagcagcacgccatagtgactggcgatgctgtcggaatggacgatatcccgcaagaggcccggcagtaccggcataaccaagcctatgcctacagcatccagggtgacggtgccgaggatgacgatgagcgcattgttagatttcatacacggtgcctgactgcgttagcaatttaactgtgataaactaccgcattaaagcttatcgatgataagctgtcaaacatgagaattcgtaatcatggtcatagctgtttcctgtgtgaaattgttatccgctcacaattccacacaacatacgagccggaagcataaagtgtaaagcctggggtgcctaatgagtgagctaactcacattaattgcgttgcgctcactgcccgctttccagtcgggaaacctgtcgtgccagctgcattaatgaatcggccaacgcgcggggagaggcggtttgcgtattgggcgctcttccgcttcctcgctcactgactcgctgcgctcggtcgttcggctgcggcgagcggtatcagctcactcaaaggcggtaatacggttatccacagaatcaggggataacgcaggaaagaacatgtgagcaaaaggccagcaaaaggccaggaaccgtaaaaaggccgcgttgctggcgtttttccataggctccgcccccctgacgagcatcacaaaaatcgacgctcaagtcagaggtggcgaaacccgacaggactataaagataccaggcgtttccccctggaagctccctcgtgcgctctcctgttccgaccctgccgcttaccggatacctgtccgcctttctcccttcgggaagcgtggcgctttctcatagctcacgctgtaggtatctcagttcggtgtaggtcgttcgctccaagctgggctgtgtgcacgaaccccccgttcagcccgaccgctgcgccttatccggtaactatcgtcttgagtccaacccggtaagacacgacttatcgccactggcagcagccactggtaacaggattagcagagcgaggtatgtaggcggtgctacagagttcttgaagtggtggcctaactacggctacactagaaggacagtatttggtatctgcgctctgctgaagccagttaccttcggaaaaagagttggtagctcttgatccggcaaacaaaccaccgctggtagcggtggtttttttgtttgcaagcagcagattacgcgcagaaaaaaaggatctcaagaagatcctttgatcttttctacggggtctgacgctcagtggaacgaaaactcacgttaagggattttggtcatgagattatcaaaaaggatcttcacctagatccttttaaattaaaaatgaagttttaaatcaatctaaagtatatatgagtaaacttggtctgacagttaccaatgcttaatcagtgaggcacctatctcagcgatctgtctatttcgttcatccatagttgcctgactccccgtcgtgtagataactacgatacgggagggcttaccatctggccccagtgctgcaatgataccgcgagacccacgctcaccggctccagatttatcagcaataaaccagccagccggaagggccgagcgcagaagtggtcctgcaactttatccgcctccatccagtctattaattgttgccgggaagctagagtaagtagttcgccagttaatagtttgcgcaacgttgttgccattgctacaggcatcgtggtgtcacgctcgtcgtttggtatggcttcattcagctccggttcccaacgatcaaggcgagttacatgatcccccatgttgtgcaaaaaagcggttagctccttcggtcctccgatcgttgtcagaagtaagttggccgcagtgttatcactcatggttatggcagcactgcataattctcttactgtcatgccatccgtaagatgcttttctgtgactggtgagtactcaaccaagtcattctgagaatagtgtatgcggcgaccgagttgctcttgcccggcgtcaatacgggataataccgcgccacatagcagaactttaaaagtgctcatcattggaaaacgttcttcggggcgaaaactctcaaggatcttaccgctgttgagatccagttcgatgtaacccactcgtgcacccaactgatcttcagcatcttttactttcaccagcgtttctgggtgagcaaaaacaggaaggcaaaatgccgcaaaaaagggaataagggcgacacggaaatgttgaatactcatactcttcctttttcaatattattgaagcatttatcagggttattgtctcatgagcggatacatatttgaatgtatttagaaaaataaacaaataggggttccgcgcacatttccccgaaaagtgccacctgacgtctaagaaaccattattatcatgacattaacctataaaaataggcgtatcacgaggccctttcg

SEQ ID NO: 2016 - DNA, 324 bp, Homo sapiens; identical to SEQ ID NO: 1887

SEQ ID NO: 2017 - DNA, 354 bp, Homo sapiens
gaggtgcagctgttggagtctgggggaggcttggtacagcctggggggtccctgcgtctctcctgtgcagcctccggattcatctttgcttggtatgatatggggtgggcccgccaggctccagggaagggtctagagtgggtctcaagtattgattggaggggtgatcagacatactacgcagactccgtgaagggccggttcaccatctcccgcgacaattccaagaacacgctgtatctgcaaatgaacagcctgcgtgccgaggacaccgcggtatattactgtgcgacagcggaggacgagccggggtatgactactggggtcagggaaccctggtcaccgtctcgagc

SEQ ID NO: 2018 - DNA, 354 bp, Homo sapiens
gaggtgcagctgttggagtctgggggaggcttggtacagcctggggggtccctgcgtctctcctgtgcagcctccggattcatctttgcttggtatgatatggggtgggcccgccaggctccagggaagggtctagagtgggtctcaagtattgattggaagggtggtaagacatactacgcagactccgtgaagggccggttcaccatctcccgcgacaattccaagaacacgctgtatctgcaaatgaacagcctgcgtgccgaggacaccgcggtatattactgtgcgacagcggaggacgagccggggtatgactactggggtcagggaaccctggtcaccgtctcgagc

SEQ ID NO: 2019 - DNA, 354 bp, Homo sapiens
ggggtgcagctgttggagtctgggggaggcttggtacagcctggggggtccctgcgtctctcctgtgcagcctccggattcatctttgcttggtatgatatggggtgggtccgccaggctccagggaagggtctagagtgggtctcaagtattgattggcatggtgaggttgaatactacgcagactccgtgaagggccggttcaccatctcccgcgacaattccaagaacacgctgtatctgcaaatgaacagcctgcgtgccgaggacaccgcggtatattactgtgcgacagcggaggacgagccggggtatgactactggggtcagggaaccctggtcaccgtctcgagc

SEQ ID NO: 2020 - DNA, 354 bp, Homo sapiens
gaggtgcagctgttggagtctgggggaggcttggtacagcctggggggtccctgcgtctctcctgtgcagcctccggattcatctttgcttggtatgatatggggtgggtccgccaggctccagggaagggtctagagtgggtctcaagtattgattggcatggtaagattacatactacgcagactccgtgaagggccggttcaccatctcccgcgacaattccaagaacacgctgtatctgcaaatgaacagcctgcgtgccgaggacaccgcggtatattactgtgcgacagcggaggacgagccggggtatgactactggggtcagggaaccctggtcaccgtctcgagc

SEQ ID NO: 2021 - DNA, 354 bp, Homo sapiens
gaggtgcagctgttggagtctgggggaggcttggtacagcctggggggtccctgcgtctctcctgtgcagcctccggattcatctttgcttggtatgatatggggtgggtccgccaggctccagggaagggtctagagtgggtctcaagtattgattggaagggtatggagacatactacgcagactccgtgaagggccggttcaccatctcccgcgacaattccaagaacacgctgtatctgcaaatgaacagcctgcgtgccgaggacaccgcggtatattactgtgcgacagcggaggacgagccggggtatgactactggggtcagggaaccctggtcaccgtctcgagc

SEQ ID NO: 2022 - DNA, 354 bp, Homo sapiens
gaggtgcagctgttggagtctgggggaggcttggtacagcctggggggtccctgcgtctctcctgtgcagcctccggattcgcgtttgctgcgtatgatatggggtgggtccgccaggctccagggaagggtctagagtgggtctcaagtattgattggaagggtatggagacatactacgcagactccgtgaagggccggttcaccatctcccgcgacaattccaagaacacgctgtatctgcaaatgaacagcctgcgtgccgaggacaccgcggtatattactgtgcgacagcggaggacgagccggggtatgactactggggtcagggaaccctggtcaccgtctcgagc

SEQ ID NO: 2023 - DNA, 354 bp, Homo sapiens
ggggtgcagctgttggagtctgggggaggcttggtacagcctggggggtccctgcgtctctcctgtgcagcctccggattcatctttgctgtgtatgatatggggtgggcccgccaggctccagggaagggtctagagtgggtctcaagtattaatgatggtggtaatgttacatactacgcagactccgtgaagggccggttcaccatctcccgcgacaattccaagaacacgctgtatctgcaaatgaacagcctgcgtgccgaggacaccgcggtatattactgtgcgacagcggaggacgagccggggtatgactactggggtcagggaaccctggtcaccgtctcgagc

SEQ ID NO: 2024 - DNA, 354 bp, Homo sapiens
ggggtgcagctgttggagtctgggggaggcttggtacagcctggggggtccctgcgtctctcctgtgcagcctccggattcatctttgctgtgtatgatatggggtgggcccgccaggctccagggaagggtctagagtgggtctcaagtattaatgatggtggtaatgttacatactacgcagactccgtgaagggccggttcaccatctcccgcgacaattccaagaacacgctgtatctgcaaatgaacagcctgcgtgccgaggacaccgcggtatattactgtgcgacagcggaggacgagccggggtatgactaccggggtcagggaaccctggtcaccgtctcgagc

SEQ ID NO: 2025 - DNA, 354 bp, Homo sapiens
gaggtgcagctgttggagtctgggggaggcttgatacagcctggggggtccctgcgtctctcctgtgcagcctccggattcatctttgctgtgtatgatatggggtgggcccgccaggctccagggaagggtctagagtgggtctcaagtattaatgatggtggtaatgttacatactacgcagactccgtgaagggccggttcaccatctcccgcgacaattccaagaacacgctgtatctgcaaatgaacagcctgcgtgccgaggacaccgcggtatattactgtgcgacagcggaggacgagccggggtatgactaccggggtcagggaaccctggtcaccgtctcgagc

SEQ ID NO: 2026 - DNA, 354 bp, Homo sapiens
ggggtgcagctgttggagtctgggggaggcttggtacagcctggggggtccctgcgtctctcctgtgcagcctccggattcatctttgcttggtatgatatgatgtgggcccgccaggctccagggaagggtctagagtgggtctcaagtattaatgatggtggtaatgttacatactacgcagactccgtgaagggccggttcaccatctcccgcgacaattccaagaacacgctgtatctgcaaatgaacagcctgcgtgccgaggacaccgcggtatattactgtgcgacagcggaggacgagccggggtatgactactggggtcagggaaccctggtcaccgtctcgagc

SEQ ID NO: 2027 - DNA, 354 bp, Homo sapiens
ggggtgcagctgttggagtctgggggaggcttggtacagcctggggggtccctgcgtctctcctgtgcagcctccggattcatctttgcttggtatgatatggggtgggtccgccaggctccagggaagggtctagagtgggtctcaagtattaacgaccatggtaagattacatactacgcagactccgtgaagggccggttcaccatctcccgcgacaattccaagaacacgctgtatctgcaaatgaacagcctgcgtgccgaggacaccgcggtatattactgtgcgacagcggaggacgagccggggtatgactactggggtcagggaaccctggtcaccgtctcgagc

SEQ ID NO: 2028 - DNA, 354 bp, Homo sapiens
ggggtgcagctgttggagtctgggggaggcttggtacagcctggggggtccctgcgtctctcctgtgcagcctccggattcatctttgcttggtatgatatggggtgggtccgccaggctccagggaagggtctagagtgggtctcaagtattaacgacacgggtaatgttacatactacgcagactccgtgaagggccggttcaccatctcccgcgacaattccaagaacacgctgtatctgcaaatgaacagcctgcgtgccgaggacaccgcggtatattactgtgcgacagcggaggacgagccggggtatgactactggggtcagggaaccctggtcaccgtctcgagc

SEQ ID NO: 2029 - DNA, 354 bp, Homo sapiens
ggggtgcagctgttggagtctgggggaggcttggtacagcctggggggtccctgcgtctctcctgtgcagcctccggattcatctttgcttggtatgatatggggtgggtccgccaggctccagggaagggtctagagtgggtctcaagtattaacgacaagggtggtaagacatactacgcagactccgtgaagggccggttcaccatctcccgcgacaattccaagaacacgctgtatctgcaaatgaacagcctgcgtgccgaggacaccgcggtatattactgtgcgacagcggaggacgagccggggtatgactactggggtcagggaaccctggtcaccgtctcgagc

SEQ ID NO: 2030 - DNA, 354 bp, Homo sapiens
ggggtgcagctgttggagtctgggggaggcttggtacagcctggggggtccctgcgtctctcctgtgcagcctccggattcatctttgcttggtatgatatggggtgggcccgccaggctccagggaagggtctagagtgggtctcaagtattgattggaagggtggtaagacatactacgcagactccgtgaagggccggttcaccatctcccgcgacaattccaagaacacgctgtatctgcaaatgaacagcctgcgtgccgaggacaccgcggtatattactgtgcgacagcggaggacgagccggggtttgactactggggtcagggaaccctggtcaccgtctcgagc

SEQ ID NO: 2031 - DNA, 354 bp, Homo sapiens
ggggtgcagctgttggagtctgggggaggcttggtacagcctggggggtccctgcgtctctcctgtgcagcctccggattcatctttgctgtgtatgatatggggtgggcccgccaggctccagggaagggtctagagtgggtctcaagtattgattggaagggtatggagacatactacgcagactccgtgaagggccggttcaccatctcccgcgacaattccaagaacacgctgtatctgcaaatgaacagcctgcgtgccgaggacaccgcggtatattactgtgcgacagcggaggacgagccggggtatgactactggggtcagggaaccctggtcaccgtctcgagc

SEQ ID NO: 2032 - DNA, 354 bp, Homo sapiens
ggggtgcagctgttggagtctgggggaggcttggtacagcctggggggtccctgcgtctctcctgtgcagcctccggattcatctttgcttggtatgatatggggtgggtccgccaggctccagggaagggtctagagtgggtctcaagtattaacgacaagggtatggagacatactacgcagactccgtgaagggccggttcaccatctcccgcgacaattccaagaacacgctgtatctgcaaatgaacagcctgcgtgccgaggacaccgcggtatattactgtgcgacagcggaggacgagccggggtatgactactggggtcagggaaccctggtcaccgtctcgagc

SEQ ID NO: 2033 - DNA, 354 bp, Homo sapiens
ggggtgcagctgttggagtctgggggaggcttggtacagcctggggggtccctgcgtctctcctgtgcagcctccggattcatctttgcttggtatgatatggggtgggtccgccaggctccagggaagggtctagagtgggtctcaagtattaacgacaggggtgatcagacatactacgcagactccgtgaagggccggttcaccatctcccgcgacaattccaagaacacgctgtatctgcaaatgaacagcctgcgtgccgaggacaccgcggtatattactgtgcgacagcggaggacgagccggggtatgactactggggtcagggaaccctggtcaccgtctcgagc

SEQ ID NO: 2034 - DNA, 354 bp, Homo sapiens
ggggtgcagctgttggagtctgggggaggcttggtacagcctggggggtccctgcgtctctcctgtgcagcctccggattcatctttgcttggtatgatatggggtgggtccgccaggctccagggaagggtctagagtgggtctcaagtattaacgaccagggtaatactacatactacgcagactccgtgaagggccggttcaccatctcccgcgacaattccaagaacacgctgtatctgcaaatgaacagcctgcgtgccgaggacaccgcggtatattactgtgcgacagcggaggacgagccggggtatgactactggggtcagggaaccctggtcaccgtctcgagc

SEQ ID NO: 2035 - DNA, 354 bp, Homo sapiens
ggggtgcagctgttggagtctgggggaggcttggtacagcctggggggtccctgcgtctctcctgtgcagcctccggattcatctttgctgcgtatgctatggggtgggtccgccaggctccagggaagggtctagagtgggtctcaagtattgattggaagggtatggagacatactacgcagactccgtgaagggccggttcaccatctcccgcgacaattccaagaacacgctgtatctgcaaatgaacagcctgcgtgccgaggacaccgcggtatattactgtgcgacagcggaggacgagccggggtatgactactggggtcagggaaccctggtcaccgtctcgagc

SEQ ID NO: 2036 - DNA, 354 bp, Homo sapiens
ggggtgcagctgttggagtctgggggaggcttggtacagcctggggggtccctgcgtctctcctgtgcagcctccggattcatctttgctgcgtatgctatggcgtgggtccgccaggctccagggaagggtctagagtgggtctcaagtattgattggaagggtatggagacatactacgcagactccgtgaagggccggttcaccatctcccgcgacaattccaagaacacgctgtatctgcaaatgaacagcctgcgtgccgaggacaccgcggtatattactgtgcgacagcggaggacgagccggggtatgactactggggtcagggaaccctggtcaccgtctcgagc

SEQ ID NO: 2037 - DNA, 354 bp, Homo sapiens
ggggtgcagctgttggagtctgggggaggcttggtacagcctggggggtccctgcgtctctcctgtgcagcctccggattcatctttgcttggtatgatatggggtgggtccgccaggctccagggaagggtctagagtgggtctcaagtattgatgcagcgggtgcggagacatactacgcagactccgtgaagggccggttcaccatctcccgcgacaattccaagaacacgctgtatctgcaaatgaacagcctgcgtgccgaggacaccgcggtatattactgtgcgacagcggaggacgagccggggtatgactactggggtcagggaaccctggtcaccgtctcgagc

SEQ ID NO: 2038 - DNA, 354 bp, Homo sapiens
ggggtgcagctgttggagtctgggggaggcttggtacagcctggggggtccctgcgtctctcctgtgcagcctccggattcatctttgcttggtatgatatggggtgggtccgccaggctccagggaagggtctagagtgggtctcaagtattgattgggcgggtgctgcgacatactacgcagactccgtgaagggccggttcaccatctcccgcgacaattccaagaacacgctgtatctgcaaatgaacagcctgcgtgccgaggacaccgcggtatattactgtgcgacagcggaggacgagccggggtatgactactggggtcagggaaccctggtcaccgtctcgagc

SEQ ID NO: 2039 - DNA, 354 bp, Homo sapiens
ggggtgcagctgttggagtctgggggaggcttggtacagcctggggggtccctgcgtctctcctgtgcagcctccggattcatctttgcttggtatgatatggggtgggtccgccaggctccagggaagggtctagagtgggtctcaagtattgattggaagggtatggagacatactacgcagactccgtgaagggccggttcaccatctcccgcgacaattccaagaacacgctgtatctgcaaatgaacagcctgcgtgccgaggacaccgcggtatattactgtgcgacagcggctgcagagccggggtatgactactggggtcagggaaccctggtcaccgtctcgagc

SEQ ID NO: 2040 - DNA, 354 bp, Homo sapiens
ggggtgcagctgttggagtctgggggaggcttggtacagcctggggggtccctgcgtctctcctgtgcagcctccggattcatctttgcttggtatgatatggggtgggtccgccaggctccagggaagggtctagagtgggtctcaagtattgattggaagggtatggagacatactacgcagactccgtgaagggccggttcaccatctcccgcgacaattccaagaacacgctgtatctgcaaatgaacagcctgcgtgccgaggacaccgcggtatattactgtgcgacagcggctgcagcgccggggtatgactactggggtcagggaaccctggtcaccgtctcgagc

SEQ ID NO: 2041 - DNA, 354 bp, Homo sapiens
ggggtgcagctgttggagtctgggggaggcttggtacagcctggggggtccctgcgtctctcctgtgcagcctccggattcatctttgcttggtatgatatggggtgggtccgccaggctccagggaagggtctagagtgggtctcaagtattgattggaagggtatggagacatactacgcagactccgtgaagggccggttcaccatctcccgcgacaattccaagaacacgctgtatctgcaaatgaacagcctgcgtgccgaggacaccgcggtatattactgtgcgacagcggaggcagcggcggggtatgactactggggtcagggaaccctggtcaccgtctcgagc

SEQ ID NO: 2042 - DNA, 354 bp, Homo sapiens
ggggtgcagctgttggagtctgggggaggcttggtacagcctggggggtccctgcgtctctcctgtgcagcctccggattcatctttgcttggtatgatatggggtgggtccgccaggctccagggaagggtctagagtgggtctcaagtattgattggaagggtatggagacatactacgcagactccgtgaagggccggttcaccatctcccgcgacaattccaagaacacgctgtatctgcaaatgaacagcctgcgtgccgaggacaccgcggtatattactgtgcgacagcggaggacgcggcggcttatgactactggggtcagggaaccctggtcaccgtctcgagc

SEQ ID NO: 2043 - DNA, 354 bp, Homo sapiens
ggggtgcagctgttggagtctgggggaggcttggtacagcctggggggtccctgcgtctctcctgtgcagcctccggagcagccgccgcttggtatgatatggggtgggtccgccaggctccagggaagggtctagagtgggtctcaagtattgattggaagggtatggagacatactacgcagactccgtgaagggccggttcaccatctcccgcgacaattccaagaacacgctgtatctgcaaatgaacagcctgcgtgccgaggacaccgcggtatattactgtgcgacagcggaggacgagccggggtatgactactggggtcagggaaccctggtcaccgcctcgagc

SEQ ID NO: 2044 - DNA, 354 bp, Homo sapiens
ggggtgcagctgttggagtctgggggaggcttggtacagcctggggggtccctgcgtctctcctgtgcagcctccggattcgcgtttgctgcgtatgatatggggtgggtccgccaggctccagggaagggtctagagtgggtctcaagtattgattggaagggtatggagacatactacgcagactccgtgaagggccggttcaccatctcccgcgacaattccaagaacacgctgtatctgcaaatgaacagcctgcgtgccgaggacaccgcggtatattactgtgcgacagcggaggacgagccggggtatgactactggggtcagggaaccctggtcaccgtctcgagc

SEQ ID NO: 2045 - DNA, 354 bp, Homo sapiens
ggggtgcagctgttggagtctgggggaggcttggtacagcctggggggtccctgcgtctctcctgtgcagcctccggattcatctttgcttggtatgatatggggtgggtccgccaggctccagggaagggtctagagtgggtctcagctattgctgcgaagggtatggagacatactacgcagactccgtgaagggccggttcaccatctcccgcgacaattccaagaacacgctgtatctgcaaatgaacagcctgcgtgccgaggacaccgcggtatattactgtgcgacagcggaggacgagccggggtatgactactggggtcagggaaccctggtcaccgtctcgagc

SEQ ID NO: 2046 - DNA, 354 bp, Homo sapiens
ggggtgcagctgttggagtctgggggaggcttggtacagcctggggggtccctgcgtctctcctgtgcagcctccggattcatctttgcttggtatgatatggggtgggtccgccaggctccagggaagggtctagagtgggtctcaagtattgctgcagcgggtatggagacatactacgcagactccgtgaagggccggttcaccatctcccgcgacaattccaagaacacgctgtatctgcaaatgaacagcctgcgtgccgaggacaccgcggtatattactgtgcgacagcggaggacgagccggggtatgactactggggtcagggaaccctggtcaccgtctcgagc

SEQ ID NO: 2047 - DNA, 354 bp, Homo sapiens
ggggtgcagctgttggagtctgggggaggcttggtacagcctggggggtccctgcgtctctcctgtgcagcctccggattcatctttgcttggtatgatatggggtgggtccgccaggctccagggaagggtctagagtgggtctcaagtattaatgatggtggtgaggttacatactacgcagactccgtgaagggccggttcaccatctcccgcgacaattccaagaacacgctgtatctgcaaatgaacagcctgcgtgccgaggacaccgcggtatattactgtgcgacagcggaggacgagccggggtatgactactggggtcagggaaccctggtcaccgtctcgagc

SEQ ID NO: 2048 - DNA, 354 bp, Homo sapiens
ggggtgcagctgttggagtctgggggaggcttggtacagcctggggggtccctgcgtctctcctgtgcagcctccggattcatctttgcttggtatgatatggggtgggtccgccaggctccagggaagggtctagagtgggtctcaagtattgattggaggggtgatcagacatactacgcagactccgtgaagggccggttcaccatctcccgcgacaattccaagaacacgctgtatctgcaaatgaacagcctgcgtgccgaggacaccgcggtatattactgtgcgacagcggaggacgagccggggtatgactactggggtcagggaaccctggtcaccgtctcgagc

SEQ ID NO: 2049 - DNA, 354 bp, Homo sapiens
ggggtgcagctgttggagtctgggggaggcttggtacagcctggggggtccctgcgtctctcctgtgcagcctccggattcatctttgcttggtatgatatggggtgggtccgccaggctccagggaagggtctagagtgggtctcaagtattaatgatcgtggtgaggttacatactacgcagactccgtgaagggccggttcaccatctcccgcgacaattccaagaacacgctgtatctgcaaatgaacagcctgcgtgccgaggacaccgcggtatattactgtgcgacagcggaggacgagccggggtatgactactggggtcagggaaccctggtcaccgtctcgagc

SEQ ID NO: 2050 - DNA, 354 bp, Homo sapiens
ggggtgcagctgttggagtctgggggaggcttggtacagcctggggggtccctgcgtctctcctgtgcagcctccggattcatctttgcttggtatgatatgaagtgggcccgccaggctccagggaagggtctagagtgggtctcaagtattgattggcatggtaatgttacatactacgcagactccgtgaagggccggttcaccatctcccgcgacaattccaagaacacgctgtatctgcaaatgaacagcctgcgtgccgaggacaccgcggtatattactgtgcgacagcggaggacgagccggggtatgactactggggtcagggaaccctggtcaccgtctcgagc

SEQ ID NO: 2051 - DNA, 354 bp, Homo sapiens
ggggtgcagctgttggagtctgggggaggcttggtacagcctggggggtccctgcgtctctcctgtgcagcctccggattcatctttgcttggtatgatatggggtgggtccgccaggctccagggaagggtctagagtgggtctcaagtattaatgatggtggtaatgttaagtactacgcagactccgtgaagggccggttcaccatctcccgcgacaattccaagaacacgctgtatctgcaaatgaacagcctgcgtgccgaggacaccgcggtatattactgtgcgacagcggaggacgagccggggtatgactactggggtcagggaaccctggtcaccgtctcgagc

SEQ ID NO: 2052 - DNA, 354 bp, Homo sapiens
ggggtgcagctgttggagtctgggggaggcttggtacagcctggggggtccctgcgtctctcctgtgcagcctccggattcatctttgcttggtatgatatggggtgggtccgccaggctccagggaagggtctagagtgggtctcaagtattaatgatggtggtaatgttatttactacgcagactccgtgaagggccggttcaccatctcccgcgacaattccaagaacacgctgtatctgcaaatgaacagcctgcgtgccgaggacaccgcggtatattactgtgcgacagcggaggacgagccggggtatgactactggggtcagggaaccctggtcaccgtctcgagc

SEQ ID NO: 2053 - DNA, 354 bp, Homo sapiens
ggggtgcagctgttggagtctgggggaggcttggtacagcctggggggtccctgcgtctctcctgtgcagcctccggattcatctttgcttggtatgatatggggtgggtccgccaggctccagggaagggtctagagtgggtctcaagtattgattggaagggtggtaagacatactacgcagactccgtgaagggccggttcaccatctcccgcgacaattccaagaacacgctgtatctgcaaatgaacagcctgcgtgccgaggacaccgcggtatattactgtgcgacagcggaggacgagccggggtatgactactggggtcagggaaccctggtcaccgtctcgagc

SEQ ID NO: 2054 - DNA, 354 bp, Homo sapiens
ggggtgcagctgttggagtctgggggaggcttggtacagcctggggggtccctgcgtctctcctgtgcagcctccggattcatctttgcttggtatgatatgatgtgggcccgccaggctccagggaagggtctagagtgggtctcaagtattgattggaagggtatggagacatactacgcagactccgtgaagggccggttcaccatctcccgcgacaattccaagaacacgctgtatctgcaaatgaacagcctgcgtgccgaggacaccgcggtatattactgtgcgacagcggaggacgagccggggtatgactactggggtcagggaaccctggtcaccgtctcgagc

SEQ ID NO: 2055 - DNA, 354 bp, Homo sapiens
ggggtgcagctgttggagtctgggggaggcttggtacagcctggggggtccctgcgtctctcctgtgcagcctccggattcatctttgcttggtatgatatggggtgggcccgccaggctccagggaagggtctagagtgggtctcaagtattgattggaagggtggtaagacatactacgcagactccgtgaagggccggttcaccatctcccgcgacaattccaagaacacgctgtatctgcaaatgaacagcctgcgtgatgaggacaccgcggtatattactgtgcgacagcggaggacgagccggggtatgactactggggtcagggaaccctggtcaccgtctctagc

SEQ ID NO: 2056 - DNA, 354 bp, Homo sapiens
gaggtgcagctggtggagtctgggggaggcttggtacagcctggggggtccctgcgtctctcctgtgcagcctccggattcatctttgcttggtatgatatggggtgggcccgccaggctccagggaagggtctagagtgggtctcaagtattgattggaagggtggtaagacatactacgcagactccgtgaagggccggttcaccatctcccgcgacaattccaagaacacgctgtatctgcaaatgacgagcctgcgtgccgaggacaccgcggtatattactgtgcgacagcggaggacgagccggggtatgactactggggtcagggaaccctggtcaccgtctctagc

SEQ ID NO: 2057 - DNA, 354 bp, Homo sapiens
ggggtgcagctgttggagtctgggggaggcttggtacagcctggggggtccctgcgtctctcctgtgcagcctccggattcatctttgcttggtatgatatggggtgggcccgccaggctccagggaagggtctagagtgggtctcaagtattgattggaagggtggtaagacatactacgcagactccgtgaagggccggttcaccatctcccgcgacaattccaagaacacgctgtatctgcaaatgaacagcctgcgtgccgaggacaccgcggtatattactgtgcgacagcggaggacgagccggggtttgactactggggtcagggaaccctggtcaccgtctctagc

SEQ ID NO: 2058 - DNA, 354 bp, Homo sapiens
gaggtgcagctggtggagtctgggggaggcttggtaaagcctggggggtccctgcgtctctcctgtgcagcctccggattcatctttgcttggtatgatatggggtgggcccgccaggctccagggaagggtctagagtgggtctcaagtattgattggaagggtggtaagacatactacgcagcacccgtgaagggcagattcaccatctcaagagatgattcaaaaaacacgctgtatctgcaaatgaacagcctgaaaaccgaggacaccgcggtatattactgtgcgacagcggaggacgagccggggtatgactactggggtcagggaaccctggtcaccgtctctagc

SEQ ID NO: 2059 - DNA, 354 bp, Homo sapiens
ggggtgcagctgttggagtctgggggaggcttggtacagcctggggggtccctgcgtctctcctgtgcagcctccggattcatctttgcttggtatgatatggggtgggtccgccaggctccagggaagggtctagagtgggtctcaagtattgattggaagggtggtaagacatactacgcagactccgtgaagggccggttcaccatctcccgcgacaattccaagaacacgctgtatctgcaaatgaacagcctgcgtgccgaggacaccgcggtatattactgtgcgacagcggaggacgagccggggtttgactactggggtcagggaaccctggtcaccgtctctagc

SEQ ID NO: 2060 - DNA, 354 bp, Homo sapiens
ggggtgcagctgttggagtctgggggaggcttggtacagcctggggggtccctgcgtctctcctgtgcagcctccggattcatctttgcttggtatgatatgatgtgggcccgccaggctccagggaagggtctagagtgggtctcaagtattgattggcatggtgaggttacatactacgcagactccgtgaagggccggttcaccatctcccgcgacaattccaagaacacgctgtatctgcaaatgaacagcctgcgtgccgaggacaccgcggtatattactgtgcgacagcggaggacgagccggggtatgactactggggtcagggaaccctggtcaccgtctcgagc

SEQ ID NO: 2061 - DNA, 354 bp, Homo sapiens; identical to SEQ ID NO: 2018

SEQ ID NO: 2062 - DNA, 354 bp, Homo sapiens
gaggtgcagctgttggagtctgggggaggcttggtacagcctggggggtccctgcgtctctcctgtgcagcctccggattcatctttgcttggtatgatatggggtgggtccgccaggctccagggaagggtctagagtgggtctcaagtattgattggaagggtggtaagacatactacgcagactccgtgaagggccggttcaccatctcccgcgacaattccaagaacacgctgtatctgcaaatgaacagcctgcgtgccgaggacaccgcggtatattactgtgcgacagcggaggacgagccggggtatgactactggggtcagggaaccctggtcaccgtctcgagc

SEQ ID NO: 2063 - DNA, 354 bp, Homo sapiens
caggtgcagctgttggagtctgggggaggcttggtacagcctggggggtccctgcgtctctcctgtgcagcctccggattcatctttgcttggtatgatatggggtgggcccgccaggctccagggaagggtctagagtgggtctcaagtattgattggaagggtggtaagacatactacgcagactccgtgaagggccggttcaccatctcccgcgacaattccaagaacacgctgtatctgcaaatgaacagcctgcgtgccgaggacaccgcggtatattactgtgcgacagcggaggacgagccggggtatgactactggggtcagggaaccctggtcaccgtctcgagc

SEQ ID NO: 2064 - DNA, 354 bp, Homo sapiens
caggtgcagctgttggagtctgggggaggcttggtacagcctggggggtccctgcgtctctcctgtgcagcctccggattcatctttgcttggtatgatatggggtgggtccgccaggctccagggaagggtctagagtgggtctcaagtattgattggaagggtggtaagacatactacgcagactccgtgaagggccggttcaccatctcccgcgacaattccaagaacacgctgtatctgcaaatgaacagcctgcgtgccgaggacaccgcggtatattactgtgcgacagcggaggacgagccggggtatgactactggggtcagggaaccctggtcaccgtctcgagc

SEQ ID NO: 2065 - DNA, 354 bp, Homo sapiens
ggggtgcagctgttggagtctgggggaggcttggtacagcctggggggtccctgcgtctctcctgtgcagcctccggattcatctttgcttggtatgatatgatgtgggtccgccaggctccagggaagggtctagagtgggtctcaagtattgattggcatggtaatgttacatactacgcagactccgtgaagggccggttcaccatctcccgcgacaattccaagaacacgctgtatctgcaaatgaacagcctgcgtgccgaggacaccgcggtatattactgtgcgacagcggaggacgagccggggtatgactactggggtcagggaaccctggtcaccgtctcgagc

SEQ ID NO: 2066 - DNA, 354 bp, Homo sapiens
ggggtgcagctgttggagtctgggggaggcttggtacagcctggggggtccctgcgtctctcctgtgcagcctccggattcatctttgcttggtatgatatggggtgggtccgccaggctccagggaagggtctagagtgggtctcaagtattaatgatggtggtaatgttgggtactacgcagactccgtgaagggccggttcaccatctcccgcgacaattccaagaacacgctgtatctgcaaatgaacagcctgcgtgccgaggacaccgcggtatattactgtgcgacagcggaggacgagccggggtatgactactggggtcagggaaccctggtcaccgtctcgagc

SEQ ID NO: 2067 - DNA, 354 bp, Homo sapiens
ggggtgcagctgttggagtctgggggaggcttggtacagcctggggggtccctgcgtctctcctgtgcagcctccggattcatctttgcttggtatgatatggggtgggtccgccaggctccagggaagggtctagagtgggtctcaagtattaatgatggtggtaatgtttggtactacgcagactccgtgaagggccggttcaccatctcccgcgacaattccaagaacacgctgtatctgcaaatgaacagcctgcgtgccgaggacaccgcggtatattactgtgcgacagcggaggacgagccggggtatgactactggggtcagggaaccctggtcaccgtctcgagc

SEQ ID NO: 2068 - DNA, 354 bp, Homo sapiens
ggggtgcagctgttggagtctgggggaggcttggtacagcctggggggtccctgcgtctctcctgtgcagcctccggattcatctttgcttggtatgatatggggtgggtccgccaggctccagggaagggtctagagtgggtctcaagtattaatgatggtggtaatgttatgtactacgcagactccgtgaagggccggttcaccatctcccgcgacaattccaagaacacgctgtatctgcaaatgaacagcctgcgtgccgaggacaccgcggtatattactgtgcgacagcggaggacgagccggggtatgactactggggtcagggaaccctggtcaccgtctcgagc

SEQ ID NO: 2069 - DNA, 354 bp, Homo sapiens
ggggtgcagctgttggagtctgggggaggcttggtacagcctggggggtccctgcgtctctcctgtgcagcctccggattcatctttgcttggtatgatatggggtgggtccgccaggctccagggaagggtctagagtgggtctcaagtattaatgatggtggtaatgttaggtactacgcagactccgtgaagggccggttcaccatctcccgcgacaattccaagaacacgctgtatctgcaaatgaacagcctgcgtgccgaggacaccgcggtatattactgtgcgacagcggaggacgagccggggtatgactactggggtcagggaaccctggtcaccgtctcgagc

SEQ ID NO: 2070 - DNA, 354 bp, Homo sapiens
ggggtgcagctgttggagtctgggggaggcttggtacagcctggggggtccctgcgtctctcctgtgcagcctccggattcatctttgcttggtatgatatggggtgggtccgccaggctccagggaagggtctagagtgggtctcaagtattaatgatggtggtaatgttcagtactacgcagactccgtgaagggccggttcaccatctcccgcgacaattccaagaacacgctgtatctgcaaatgaacagcctgcgtgccgaggacaccgcggtatattactgtgcgacagcggaggacgagccggggtatgactactggggtcagggaaccctggtcaccgtctcgagc

SEQ ID NO: 2071 - DNA, 354 bp, Homo sapiens
ggggtgcagctgttggagtctgggggaggcttggtacagcctggggggtccctgcgtctctcctgtgcagcctccggattcatctttgcttggtatgatatggggtgggtccgccaggctccagggaagggtctagagtgggtctcaagtattaatgatggtggtaatgtttcctactacgcagactccgtgaagggccggttcaccatctcccgcgacaattccaagaacacgctgtatctgcaaatgaacagcctgcgtgccgaggacaccgcggtatattactgtgcgacagcggaggacgagccggggtatgactactggggtcagggaaccctggtcaccgtctcgagc

SEQ ID NO: 2072 - DNA, 354 bp, Homo sapiens
ggggtgcagctgttggagtctgggggaggcttggtacagcctggggggtccctgcgtctctcctgtgcagcctccggattcatctttgcttggtatgatatggggtgggtccgccaggctccagggaagggtctagagtgggtctcaagtattaatgatggtggtaatgttgagtactacgcagactccgtgaagggccggttcaccatctcccgcgacaattccaagaacacgctgtatctgcaaatgaacagcctgcgtgccgaggacaccgcggtatattactgtgcgacagcggaggacgagccggggtatgactactggggtcagggaaccctggtcaccgtctcgagc

SEQ ID NO: 2073 - DNA, 354 bp, Homo sapiens
ggggtgcagctgttggagtctgggggaggcttggtacagcctggggggtccctgcgtctctcctgtgcagcctccggattcatctttgcttggtatgatatggggtgggtccgccaggctccagggaagggtctagagtgggtctcaagtattaatgatggtggtaatgttttctactacgcagactccgtgaagggccggttcaccatctcccgcgacaattccaagaacacgctgtatctgcaaatgaacagcctgcgtgccgaggacaccgcggtatattactgtgcgacagcggaggacgagccggggtatgactactggggtcagggaaccctggtcaccgtctcgagc

SEQ ID NO: 2074 - DNA, 354 bp, Homo sapiens
ggggtgcagctgttggagtctgggggaggcttggtacagcctggggggtccctgcgtctctcctgtgcagcctccggattcatctttgcttggtatgatatggggtgggtccgccaggctccagggaagggtctagagtgggtctcaagtattaatgatggtggtaatgttctctactacgcagactccgtgaagggccggttcaccatctcccgcgacaattccaagaacacgctgtatctgcaaatgaacagcctgcgtgccgaggacaccgcggtatattactgtgcgacagcggaggacgagccggggtatgactactggggtcagggaaccctggtcaccgtctcgagc

SEQ ID NO: 2075 - DNA, 354 bp, Homo sapiens
ggggtgcagctgttggagtctgggggaggcttggtacagcctggggggtccctgcgtctctcctgtgcagcctccggattcatctttgcttggtatgatatggggtgggtccgccaggctccagggaagggtctagagtgggtctcaagtattaatgatggtggtaatgttccgtactacgcagactccgtgaagggccggttcaccatctcccgcgacaattccaagaacacgctgtatctgcaaatgaacagcctgcgtgccgaggacaccgcggtatattactgtgcgacagcggaggacgagccggggtatgactactggggtcagggaaccctggtcaccgtctcgagc

SEQ ID NO: 2076 - DNA, 354 bp, Homo sapiens
ggggtgcagctgttggagtctgggggaggcttggtacagcctggggggtccctgcgtctctcctgtgcagcctccggattcatctttgcttggtatgatatggggtgggcccgccaggctccagggaagggtctagagtgggtctcaagtattgattggaagggtggtaagacatactacgcagactccgtgaagggccggttcaccatctccgccgacaattccaagaacacgctgtatctgcaaatgaacagcctgcgtgccgaggacaccgcggtatattactgtgcgacagcggaggacgagccggggtatgactactggggtcagggaaccctggtcaccgtctcgagc

SEQ ID NO: 2077 - DNA, 354 bp, Homo sapiens
ggggtgcagctgttggagtctgggggaggcttggtacagcctggggggtccctgcgtctctcctgtgcagcctccggattcatctttgcttggtatgatatggggtgggcccgccaggctccagggaagggtctagagtgggtctcaagtattgattggaagggtggtaagacatactacgcagactccgtgaagggccggttcaccatctccaaggacaattccaagaacacgctgtatctgcaaatgaacagcctgcgtgccgaggacaccgcggtatattactgtgcgacagcggaggacgagccggggtatgactactggggtcagggaaccctggtcaccgtctcgagc

SEQ ID NO: 2078 - DNA, 360 bp, Homo sapiens
ggggtgcagctgttggagtctgggggaggcttggtacagcctggggggtccctgcgtctctcctgtgcagcctccggattcatctttgcttggtatgatatggggtgggcccgccaggctccagggaagggtctagagtgggtctcaagtattgattggaaaactaagggtggtaagacatactacgcagactccgtgaagggccggttcaccatctcccgcgacaattccaagaacacgctgtatctgcaaatgaacagcctgcgtgccgaggacaccgcggtatattactgtgcgacagcggaggacgagccggggtatgactactggggtcagggaaccctggtcaccgtctcgagc

SEQ ID NO: 2079 - DNA, 360 bp, Homo sapiens
ggggtgcagctgttggagtctgggggaggcttggtacagcctggggggtccctgcgtctctcctgtgcagcctccggattcatctttgcttggtatgatatggggtgggcccgccaggctccagggaagggtctagagtgggtctcaagtattgattggaaagcaaagggtggtaagacatactacgcagactccgtgaagggccggttcaccatctcccgcgacaattccaagaacacgctgtatctgcaaatgaacagcctgcgtgccgaggacaccgcggtatattactgtgcgacagcggaggacgagccggggtatgactactggggtcagggaaccctggtcaccgtctcgagc

SEQ ID NO: 2080 - DNA, 354 bp, Homo sapiens
gaggtgcagctgttggagtctgggggaggcttggtacagcctggggggtccctgcgtctctcctgtgcagcctccggattcatctttgcttggtatgatatggggtgggcccgccaggctccagggaagggtctagagtgggtctcaagtattgattggaagggtggtaagacatactacgcagactccgtgaagggccggttcaccatctcccgcgacaattccaagaacacgctgtatctgcaaatgaacagcctgcgtgatgaggacaccgcggtatattactgtgcgacagcggaggacgagccggggtatgactactggggtcagggaaccctggtcaccgtctcgagc

SEQ ID NO: 2081 - DNA, 354 bp, Homo sapiens
ggggtgcagctgttggagtctgggggaggcttggtacagcctggggggtccctgcgtctctcctgtgcagcctccggattcatctttgcttggtatgatatgaagtgggcccgccaggctccagggaagggtctagagtgggtctcaagtattgattggcatggtgaggttacatactacgcagactccgtgaagggccggttcaccatctcccgcgacaattccaagaacacgctgtatctgcaaatgaacagcctgcgtgccgaggacaccgcggtatattactgtgcgacagcggaggacgagccggggtatgactactggggtcagggaaccctggtcaccgtctcgagc

SEQ ID NO: 2082 - DNA, 354 bp, Homo sapiens
ggggtgcagctgttggagtctgggggaggcttggtacagcctggggggtccctgcgtctctcctgtgcagcctccggattcatctttgcttggtatgatatgatgtgggtccgccaggctccagggaagggtctagagtgggtctcaagtattgattggcatggtgaggttacatactacgcagactccgtgaagggccggttcaccatctcccgcgacaattccaagaacacgctgtatctgcaaatgaacagcctgcgtgccgaggacaccgcggtatattactgtgcgacagcggaggacgagccggggtatgactactggggtcagggaaccctggtcaccgtctcgagc

SEQ ID NO: 2083 - DNA, 354 bp, Homo sapiens
ggggtgcagctgttggagtctgggggaggcttggtacagcctggggggtccctgcgtctctcctgtgcagcctccggattcatctttgcttggtatgatatggggtgggtccgccaggctccagggaagggtctagagtgggtctcaagtattaatgatggtggtaatgttgcctactacgcagactccgtgaagggccggttcaccatctcccgcgacaattccaagaacacgctgtatctgcaaatgaacagcctgcgtgccgaggacaccgcggtatattactgtgcgacagcggaggacgagccggggtatgactactggggtcagggaaccctggtcaccgtctcgagc

SEQ ID NO: 2084 - DNA, 357 bp, Homo sapiens
ggggtgcagctgttggagtctgggggaggcttggtacagcctggggggtccctgcgtctctcctgtgcagcctccggattcatctttgcttgggcatatgatatggggtgggcccgccaggctccagggaagggtctagagtgggtctcaagtattgattggaagggtggtaagacatactacgcagactccgtgaagggccggttcaccatctcccgcgacaattccaagaacacgctgtatctgcaaatgaacagcctgcgtgccgaggacaccgcggtatattactgtgcgacagcggaggacgagccggggtatgactactggggtcagggaaccctggtcaccgtctcgagc

SEQ ID NO: 2085 - DNA, 357 bp, Homo sapiens
ggggtgcagctgttggagtctgggggaggcttggtacagcctggggggtccctgcgtctctcctgtgcagcctccggattcatctttgcttggagttatgatatggggtgggcccgccaggctccagggaagggtctagagtgggtctcaagtattgattggaagggtggtaagacatactacgcagactccgtgaagggccggttcaccatctcccgcgacaattccaagaacacgctgtatctgcaaatgaacagcctgcgtgccgaggacaccgcggtatattactgtgcgacagcggaggacgagccggggtatgactactggggtcagggaaccctggtcaccgtctcgagc

SEQ ID NO: 2086 - DNA, 354 bp, Homo sapiens
ggggtgcagctgttggagtctgggggaggcttggtacagcctggggggtccctgcgtctctcctgtgcagtctccggattcatctttgcttggtatgatatggggtgggcccgccaggctccagggaagggtctagagtgggtctcaagtattgattggaagggtggtaagacatactacgcagactccgtgaagggccggttcaccatctcccgcgacaattccaagaacacgctgtatctgcaaatgaacagcctgcgtgccgaggacaccgcggtatattactgtgcgacagcggaggacgagccggggtatgactactggggtcagggaaccctggtcaccgtctcgagc

SEQ ID NO: 2087 - DNA, 354 bp, Homo sapiens
ggggtgcagctgttggagtctgggggaggcttggtacagcctggggggtccctgcgtctctcctgtgcagcctccggattcatctttgcttggtatgatatgaagtgggcccgccaggctccagggaagggtctagagtgggtctcaagtattgattggcatggtgaggttacatactacgcagactccgtgaagggccggttcaccatctcccgcgacaattccaagaacacgctgtatctgcaaatgaacagcctgcgtgatgaggacaccgcggtatattactgtgcgacagcggaggacgagccggggtatgactactggggtcagggaaccctggtcaccgtctcgagc

SEQ ID NO: 2088 - DNA, 354 bp, Homo sapiens
gaggtgcagctgttggagtctgggggaggcttggtacagcctggggggtccctgcgtctctcctgtgcagcctccggattcacctttgatagggaggagatggattgggtccgccaggctccagggaagggtctagagtgggtctcaagtattgattggaagggtggtaagacatactacgcagactccgtgaagggccggttcaccatctcccgcgacaattccaagaacacgctgtatctgcaaatgaacagcctgcgtgccgaggacaccgcggtatattactgtgcgacagcggaggacgagccggggtatgactactggggtcagggaaccctggtcaccgtctcgagc

SEQ ID NO: 2089 - DNA, 355 bp, Homo sapiens
ggggtgcagctgttggagtctgggggaggcttggtacagcctggggggtccctgcgtctctcctgtgcagcctccggattcatctttgcttggtatgatatgaagtgggtccgccaggctccagggaagggtctagagtgggtctcaagtattgattggcatggtgaggttacatactacgcagactccgtgaagggccggttcaccatctcccgcgacaattccaagaacacgctgtatctgcaaatgaacagcctgcgtgatgaggacaccgcggtatattactgtgcgacagcggaggacgagccggggtatgactactggggtcagggaaccctggtcaccgtctcgagct

SEQ ID NO: 2090 - DNA, 354 bp, Homo sapiens
ggggtgcagctgttggagtctgggggaggcttggtacagcctggggggtccctgcgtctctcctgtgcagcctccggatactccttcgcttggtatgatatggggtgggtccgccaggctccagggaagggtctagagtgggtctcaagtattgattggaagggtggtaagacatactacgcagactccgtgaagggccggttcaccatctcccgcgacaattccaagaacacgctgtatctgcaaatgaacagcctgcgtgccgaggacaccgcggtatattactgtgcgacagcggaggacgagccggggtatgactactggggtcagggaaccctggtcaccgtctcgagc

SEQ ID NO: 2091 - DNA, 354 bp, Homo sapiens
ggggtgcagctgttggagtctgggggaggcttggtacagcctggggggtccctgcgtctctcctgtgcagcctccggattcacgtttggggcgtatgatatggggtgggtccgccaggctccagggaagggtctagagtgggtctcaagtattgattggaagggtggtaagacatactacgcagactccgtgaagggccggttcaccatctcccgcgacaattccaagaacacgctgtatctgcaaatgaacagcctgcgtgccgaggacaccgcggtatattactgtgcgacagcggaggacgagccggggtatgactactggggtcagggaaccctggtcaccgtctcgagc

SEQ ID NO: 2092 - DNA, 354 bp, Homo sapiens
ggggtgcagctgttggagtctgggggaggcttggtacagcctggggggtccctgcgtctctcctgtgcagcctccggattcacctttcccttctatgatatggggtgggtccgccaggctccagggaagggtctagagtgggtctcaagtattgattggaagggtggtaagacatactacgcagactccgtgaagggccggttcaccatctcccgcgacaattccaagaacacgctgtatctgcaaatgaacagcctgcgtgccgaggacaccgcggtatattactgtgcgacagcggaggacgagccggggtatgactactggggtcagggaaccctggtcaccgtctcgagc

SEQ ID NO: 2093 - DNA, 354 bp, Homo sapiens
ggggtgcagctgttggagtctgggggaggcttggtacagcctggggggtccctgcgtctctcctgtgcagcctccggattcgtctttgccacgtatgatatggggtgggtccgccaggctccagggaagggtctagagtgggtctcaagtattgattggaagggtggtaagacatactacgcagactccgtgaagggccggttcaccatctcccgcgacaattccaagaacacgctgtatctgcaaatgaacagcctgcgtgccgaggacaccgcggtatattactgtgcgacagcggaggacgagccggggtatgactactggggtcagggaaccctggtcaccgtctcgagc

SEQ ID NO: 2094 - DNA, 354 bp, Homo sapiens
ggggtgcagctgttggagtctgggggaggcttggtacagcctggggggtccctgcgtctctcctgtgcagcctccggattcagcttttcggtgtatgatatggggtgggtccgccaggctccagggaagggtctagagtgggtctcaagtattgattggaagggtggtaagacatactacgcagactccgtgaagggccggttcaccatctcccgcgacaattccaagaacacgctgtatctgcaaatgaacagcctgcgtgccgaggacaccgcggtatattactgtgcgacagcggaggacgagccggggtatgactactggggtcagggaaccctggtcaccgtctcgagc

SEQ ID NO: 2095 - DNA, 354 bp, Homo sapiens
ggggtgcagctgttggagtctgggggaggcttggtacagcctggggggtccctgcgtctctcctgtgcagcctccggactcatgttgtccgcgtatgatatggggtgggtccgccaggctccagggaagggtctagagtgggtctcaagtattgattggaagggtggtaagacatactacgcagactccgtgaagggccggttcaccatctcccgcgacaattccaagaacacgctgtatctgcaaatgaacagcctgcgtgccgaggacaccgcggtatattactgtgcgacagcggaggacgagccggggtatgactactggggtcagggaaccctggtcaccgtctcgagc

SEQ ID NO: 2096 - DNA, 354 bp, Homo sapiens
ggggtgcagctgttggagtctgggggaggcttggtacagcctggggggtccctgcgtctctcctgtgcagcctccggattcctcttcaccacgtatgatatggggtgggtccgccaggctccagggaagggtctagagtgggtctcaagtattgattggaagggtggtaagacatactacgcagactccgtgaagggccggttcaccatctcccgcgacaattccaagaacacgctgtatctgcaaatgaacagcctgcgtgccgaggacaccgcggtatattactgtgcgacagcggaggacgagccggggtatgactactggggtcagggaaccctggtcaccgtctcgagc

SEQ ID NO: 2097 - DNA, 354 bp, Homo sapiens
ggggtgcagctgttggagtctgggggaggcttggtacagcctggggggtccctgcgtctctcctgtgcagcctccggattcaccttcgcttggtatgatatggggtgggtccgccaggctccagggaagggtctagagtgggtctcaagtattgattggaagggtggtaagacatactacgcagactccgtgaagggccggttcaccatctcccgcgacaattccaagaacacgctgtatctgcaaatgaacagcctgcgtgccgaggacaccgcggtatattactgtgcgacagcggaggacgagccggggtatgactactggggtcagggaaccctggtcaccgtctcgagc

SEQ ID NO: 2098 - DNA, 354 bp, Homo sapiens
ggggtgcagctgttggagtctgggggaggcttggtacagcctggggggtccctgcgtctctcctgtgcagcctccggattctccttcgcttggtatgatatggggtgggtccgccaggctccagggaagggtctagagtgggtctcaagtattgattggaagggtggtaagacatactacgcagactccgtgaagggccggttcaccatctcccgcgacaattccaagaacacgctgtatctgcaaatgaacagcctgcgtgccgaggacaccgcggtatattactgtgcgacagcggaggacgagccggggtatgactactggggtcagggaaccctggtcaccgtctcgagc

SEQ ID NO: 2099 - DNA, 354 bp, Homo sapiens
ggggtgcagctgttggagtctgggggaggcttggtacagcctggggggtccctgcgtctctcctgtgcagcctccggattcatgttttccggctatgatatggggtgggtccgccaggctccagggaagggtctagagtgggtctcaagtattgattggaagggtggtaagacatactacgcagactccgtgaagggccggttcaccatctcccgcgacaattccaagaacacgctgtatctgcaaatgaacagcctgcgtgccgaggacaccgcggtatattactgtgcgacagcggaggacgagccggggtatgactactggggtcagggaaccctggtcaccgtctcgagc

SEQ ID NO: 2100 - DNA, 354 bp, Homo sapiens
ggggtgcagctgttggagtctgggggaggcttggtacagcctggggggtccctgcgtctctcctgtgcagcctccggattcttcttcccctggtatgatatggggtgggtccgccaggctccagggaagggtctagagtgggtctcaagtattgattggaagggtggtaagacatactacgcagactccgtgaagggccggttcaccatctcccgcgacaattccaagaacacgctgtatctgcaaatgaacagcctgcgtgccgaggacaccgcggtatattactgtgcgacagcggaggacgagccggggtatgactactggggtcagggaaccctggtcaccgtctcgagc

SEQ ID NO: 2101 - DNA, 354 bp, Homo sapiens
ggggtgcagctgttggagtctgggggaggcttggtacagcctggggggtccctgcgtctctcctgtgcagcctccggattctccttcctctggtatgatatggggtgggtccgccaggctccagggaagggtctagagtgggtctcaagtattgattggaagggtggtaagacatactacgcagactccgtgaagggccggttcaccatctcccgcgacaattccaagaacacgctgtatctgcaaatgaacagcctgcgtgccgaggacaccgcggtatattactgtgcgacagcggaggacgagccggggtatgactactggggtcagggaaccctggtcaccgtctcgagc

SEQ ID NO: 2102 - DNA, 354 bp, Homo sapiens
ggggtgcagctgttggagtctgggggaggcttggtacagcctggggggtccctgcgtctctcctgtgcagcctccggattcatctttgctgtgtatgatatggggtgggtccgccaggctccagggaagggtctagagtgggtctcaagtattgattggcatggtaagattacatactacgcagactcagtgaagggccggttcaccatctcccgcgacaattccaagaacacgctgtatctgcaaatgaacagcctgcgtgccgaggacaccgcggtatattactgtgcgacagcggaggacgagccggggtatgactactggggtcagggaaccctggtcaccgtctcgagc

SEQ ID NO: 2103 - DNA, 354 bp, Homo sapiens
ggggtgcagctgttggagtctgggggaggcttggtacagcctggggggtccctgcgtctctcctgtgcagcctccggattcatctttgcttggtatgatatgaagtgggtccgccaggctccagggaagggtctagagtgggtctcaagtattgattggcatggtaagattacatactacgcagactccgtgaagggccggttcaccatctcccgcgacaattccaagaacacgctgtatctgcaaatgaacagcctgcgtgccgaggacaccgcggtatattactgtgcgacagcggaggacgagccggggtatgactactggggtcagggaaccctggtcaccgtctcgagc

SEQ ID NO: 2104 - DNA, 354 bp, Homo sapiens
ggggtgcagctgttggagtctgggggaggcttggtacagcctggggggtccctgcgtctctcctgtgcagcctccggattcaccttcgcttggtatgatatggggtgggtccgccaggctccagggaagggtctagagtgggtctcaagtattgattggcatggtaagattacatactacgcagactccgtgaagggccggttcaccatctcccgcgacaattccaagaacacgctgtatctgcaaatgaacagcctgcgtgccgaggacaccgcggtatattactgtgcgacagcggaggacgagccggggtatgactactggggtcagggaaccctggtcaccgtctctagc

SEQ ID NO: 2105 - DNA, 354 bp, Homo sapiens
ggggtgcagctgttggagtctgggggaggcttggtacagcctggggggtccctgcgtctctcctgtgcagcctccggattcaccttcgcttggtatgatatggggtgggtccgccaggctccagggaagggtctagagtgggtctcaagtattgattggcatggtgaggttacatactacgcagactccgtgaagggccggttcaccatctcccgcgacaattccaagaacacgctgtatctgcaaatgaacagcctgcgtgccgaggacaccgcggtatattactgtgcgacagcggaggacgagccggggtatgactactggggccagggaaccctggtcaccgtctctagc

SEQ ID NO: 2106 - DNA, 354 bp, Homo sapiens
ggggtgcagctgttggagtctgggggaggcttggtacagcctggggggtccctgcgtctctcctgtgcagcctccggattcatctttgggtggtatgatatggggtgggtccgccaggctccagggaagggtctagagtgggtctcaagtattgattggaagggtggtaagacatactacgcagactccgtgaagggccggttcaccatctcccgcgacaattccaagaacacgctgtatctgcaaatgaacagcctgcgtgccgaggacaccgcggtatattactgtgcgacagcggaggacgagccggggtatgactactggggtcagggaaccctggtcaccgtctcgagc

SEQ ID NO: 2107 - DNA, 354 bp, Homo sapiens
ggggtgcagctgttggagtctgggggaggcttggtacagcctggggggtccctgcgtctctcctgtgcagcctccggattcatctttgggtggtatgacatggggtgggtccgccaggctccagggaagggtctagagtgggtctcaagtattgattggaagggtggtaagacatactacgcagactccgtgaagggccggttcaccatctcccgcgacaattccaagaacacgctgtatctgcaaatgaacagcctgcgtgccgaggacaccgcggtatattactgtgcgacagcggaggacgagccggggtatgactactggggtcagggaaccctggtcaccgtctcgagc

SEQ ID NO: 2108 - DNA, 354 bp, Homo sapiens
ggggtgcagctgttggagtctgggggaggcttggtacagcctggggggtccctgcgtctctcctgtgcagcctccggattcaacttcgcttggtatgatatggggtgggtccgccaggctccagggaagggtctagagtgggtctcaagtattgattggaagggtggtaagacatactacgcagactccgtgaagggccggttcaccatctcccgcgacaattccaagaacacgctgtatctgcaaatgaacagcctgcgtgccgaggacaccgcggtatattactgtgcgacagcggaggacgagccggggtatgactactggggtcagggaaccctggtcaccgtctcgagc

SEQ ID NO: 2109 - DNA, 354 bp, Homo sapiens
ggggtgcagctgttggagtctgggggaggcttggtacagcctggggggtccctgcgtctctcctgtgcagcctccggattcatgttctcctggtatgatatggggtgggtccgccaggctccagggaagggtctagagtgggtctcaagtattgattggaagggtggtaagacatactacgcagactccgtgaagggccggttcaccatctcccgcgacaattccaagaacacgctgtatctgcaaatgaacagcctgcgtgccgaggacaccgcggtatattactgtgcgacagcggaggacgagccggggtatgactactggggtcagggaaccctggtcaccgtctcgagc

SEQ ID NO: 2110 - DNA, 354 bp, Homo sapiens
ggggtgcagctgttggagtctgggggaggcttggtacagcctggggggtccctgcgtctctcctgtgcagcctccggattcgtgttcccgtggtatgatatggggtgggtccgccaggctccagggaagggtctagagtgggtctcaagtattgattggaagggtggtaagacatactacgcagactccgtgaagggccggttcaccatctcccgcgacaattccaagaacacgctgtatctgcaaatgaacagcctgcgtgccgaggacaccgcggtatattactgtgcgacagcggaggacgagccggggtatgactactggggtcagggaaccctggtcaccgtctcgagc

SEQ ID NO: 2111 - DNA, 354 bp, Homo sapiens
ggggtgcagctgttggagtctgggggaggcttggtacagcctggggggtccctgcgtctctcctgtgcagcctccggattcatctttcggtggtatgacatggggtgggtccgccaggctccagggaagggtctagagtgggtctcaagtattgattggaagggtggtaagacatactacgcagactccgtgaagggccggttcaccatctcccgcgacaattccaagaacacgctgtatctgcaaatgaacagcctgcgtgccgaggacaccgcggtatattactgtgcgacagcggaggacgagccggggtatgactactggggtcagggaaccctggtcaccgtctcgagc

SEQ ID NO: 2112 - DNA, 354 bp, Homo sapiens
ggggtgcagctgttggagtctgggggaggcttggtacagcctggggggtccctgcgtctctcctgtgcagcctccggattcttgttcttctggtatgatatggggtgggtccgccaggctccagggaagggtctagagtgggtctcaagtattgattggaagggtggtaagacatactacgcagactccgtgaagggccggttcaccatctcccgcgacaattccaagaacacgctgtatctgcaaatgaacagcctgcgtgccgaggacaccgcggtatattactgtgcgacagcggaggacgagccggggtatgactactggggtcagggaaccctggtcaccgtctcgagc

SEQ ID NO: 2113 - DNA, 354 bp, Homo sapiens
ggggtgcagctgttggagtctgggggaggcttggtacagcctggggggtccctgcgtctctcctgtgcagcctccggattcatctttgcttggtatgatatggggtgggcccgccaggctccagggaagggtctagagtgggtctcaattattgcctgcaagggtggtaagacatactacgcagactccgtgaagggccggttcaccatctcccgcgacaattccaagaacacgctgtatctgcaaatgaacagcctgcgtgccgaggacaccgcggtatattactgtgcgacagcggaggacgagccggggtatgactactggggtcagggaaccctggtcaccgtctcgagc

SEQ ID NO: 2114 - DNA, 354 bp, Homo sapiens
ggggtgcagctgttggagtctgggggaggcttggtacagcctggggggtccctgcgtctctcctgtgcagcctccggattcatctttgcttggtatgatatggggtgggcccgccaggctccagggaagggtctagagtgggtctcaaagattggggacaagggtggtaagacatactacgcagactccgtgaagggccggttcaccatctcccgcgacaattccaagaacacgctgtatctgcaaatgaacagcctgcgtgccgaggacaccgcggtatattactgtgcgacagcggaggacgagccggggtatgactactggggtcagggaaccctggtcaccgtctcgagc

SEQ ID NO: 2115 - DNA, 354 bp, Homo sapiens
ggggtgcagctgttggagtctgggggaggcttggtacagcctggggggtccctgcgtctctcctgtgcagcctccggattcgtgttttcgtggtatgatatggggtgggtccgccaggctccagggaagggtctagagtgggtctcaagtattgatctcgccggtcgcaagacatactacgcagactccgtgaagggccggttcaccatctcccgcgacaattccaagaacacgctgtatctgcaaatgaacagcctgcgtgccgaggacaccgcggtatattactgtgcgacagcggaggacgagccggggtatgactactggggtcagggaaccctggtcaccgtctcgagc

SEQ ID NO: 2116 - DNA, 354 bp, Homo sapiens
ggggtgcagctgttggagtctgggggaggcttggtacagcctggggggtccctgcgtctctcctgtgcagcctccggattctggtacgacgtgtatgatatggggtgggtccgccaggctccagggaagggtctagagtgggtctcaagtattgattggaagggtggtaagacatactacgcagactccgtgaagggccggttcaccatctcccgcgacaattccaagaacacgctgtatctgcaaatgaacagcctgcgtgccgaggacaccgcggtatattactgtgcgacagcggaggacgagccggggtatgactactggggtcagggaaccctggtcaccgtctcgagc

SEQ ID NO: 2117 - DNA, 354 bp, Homo sapiens
ggggtgcagctgttggagtctgggggaggcttggtacagcctggggggtccctgcgtctctcctgtgcagcctccggattcgtcttcgcttggtatgatatggggtgggtccgccaggctccagggaagggtctagagtgggtctcaagtattgattggaagggtggtaagacatactacgcagactccgtgaagggccggttcaccatctcccgcgacaattccaagaacacgctgtatctgcaaatgaacagcctgcgtgccgaggacaccgcggtatattactgtgcgacagcggaggacgagccggggtatgactactggggtcagggaaccctggtcaccgtctcgagc

SEQ ID NO: 2118 - DNA, 354 bp, Homo sapiens
ggggtgcagctgttggagtctgggggaggcttggtacagcctggggggtccctgcgtctctcctgtgcagcctccggattcttgttcagcacgtatgatatggggtgggtccgccaggctccagggaagggtctagagtgggtctcaagtattgattggaagggtggtaagacatactacgcagactccgtgaagggccggttcaccatctcccgcgacaattccaagaacacgctgtatctgcaaatgaacagcctgcgtgccgaggacaccgcggtatattactgtgcgacagcggaggacgagccggggtatgactactggggtcagggaaccctggtcaccgtctcgagc

SEQ ID NO: 2119 - DNA, 354 bp, Homo sapiens
ggggtgcagctgttggagtctgggggaggcttggtacagcctggggggtccctgcgtctctcctgtgcagcctccggattgttgttcgcggcctatgatatggggtgggtccgccaggctccagggaagggtctagagtgggtctcaagtattgattggaagggtggtaagacatactacgcagactccgtgaagggccggttcaccatctcccgcgacaattccaagaacacgctgtatctgcaaatgaacagcctgcgtgccgaggacaccgcggtatattactgtgcgacagcggaggacgagccggggtatgactactggggtcagggaaccctggtcaccgtctcgagc

SEQ ID NO: 2120 - DNA, 354 bp, Homo sapiens
ggggtgcagctgttggagtctgggggaggcttggtacagcctggggggtccctgcgtctctcctgtgcagcctccggattcgtcttcgacgtctatgatatggggtgggcccgccaggctccagggaagggtctagagtgggtctcaagtattgattggaagggtggtaagacatactacgcagactccgtgaagggccggttcaccatctcccgcgacaattccaagaacacgctgtatctgcaaatgaacagcctgcgtgccgaggacaccgcggtatattactgtgcgacagcggaggacgagccggggtatgactactggggtcagggaaccctggtcaccgtctcgagc

SEQ ID NO: 2121 - DNA, 354 bp, Homo sapiens
ggggtgcagctgttggagtctgggggaggcttggtacagcctggggggtccctgcgtctctcctgtgcagcctccggattcatctttgcttggtatgatatggggtgggtccgccaggctccagggaagggtctagagtgggtctcaagtattgattggaagggtggtaagacatactacgcagactccgtgaagggccggttcaccatctcccgcgacaattccaagaacacgctgtatctgcaaatgaacagcctgcgtgccgaggacaccgcggtatattactgtgcgacagcggacgacgagccggggtatgactactggggtcagggaaccctggtcaccgtctcgagc

SEQ ID NO: 2122 - DNA, 354 bp, Homo sapiens
ggggtgcagctgttggagtctgggggaggcttggtacagcctggggggtccctgcgtctctcctgtgcagcctccggattcatctttgcttggtatgatatggggtgggcccgccaggctccagggaagggtctagagtgggtctcaagtattgattggaagggtaacaagacatactacgcagactccgtgaagggccggttcaccatctcccgcgacaattccaagaacacgctgtatctgcaaatgaacagcctgcgtgccgaggacaccgcggtatattactgtgcgacagcggaggacgagccggggtatgactactggggtcagggaaccctggtcaccgtctcgagc

SEQ ID NO: 2123 - DNA, 354 bp, Homo sapiens
ggggtgcagctgttggagtctgggggaggcttggtacagcctggggggtccctgcgtctctcctgtgcagcctccggattcatctttgctacgtatgacatgaggtgggtccgccaggctccagggaagggtctagagtgggtctcaagtattgattggaagggtggtaagacatactacgcagactccgtgaagggccggttcaccatctcccgcgacaattccaagaacacgctgtatctgcaaatgaacagcctgcgtgccgaggacaccgcggtatattactgtgcgacagcggaggacgagccggggtatgactactggggtcagggaaccctggtcaccgtctcgagc

SEQ ID NO: 2124 - DNA, 354 bp, Homo sapiens
ggggtgcagctgttggagtctgggggaggcttggtacagcctggggggtccctgcgtctctcctgtgcagcctccggattcaccatgaactggtatgatatggggtgggtccgccaggctccagggaagggtctagagtgggtctcaagtattgattggaagggtggtaagacatactacgcagactccgtgaagggccggttcaccatctcccgcgacaattccaagaacacgctgtatctgcaaatgaacagcctgcgtgccgaggacaccgcggtatattactgtgcgacagcggaggacgagccggggtatgactactggggtcagggaaccctggtcaccgtctcgagc

SEQ ID NO: 2125 - DNA, 354 bp, Homo sapiens
ggggtgcagctgttggagtctgggggaggcttggtacagcctggggggtccctgcgtctctcctgtgcagcctccggattcatctttcacacctatgacatggggtgggtccgccaggctccagggaagggtctagagtgggtctcaagtattgattggaagggtggtaagacatactacgcagactccgtgaagggccggttcaccatctcccgcgacaattccaagaacacgctgtatctgcaaatgaacagcctgcgtgccgaggacaccgcggtatattactgtgcgacagcggaggacgagccggggtatgactactggggtcagggaaccctggtcaccgtctcgagc

SEQ ID NO: 2126 - DNA, 354 bp, Homo sapiens
ggggtgcagctgttggagtctgggggaggcttggtacagcctggggggtccctgcgtctctcctgtgcagcctccggattcttgttttgggtgtatgatatggggtgggtccgccaggctccagggaagggtctagagtgggtctcaagtattgattccatcggtgccaagacatactacgcagactccgtgaagggccggttcaccatctcccgcgacaattccaagaacacgctgtatctgcaaatgaacagcctgcgtgccgaggacaccgcggtatattactgtgcgacagcggaggacgagccggggtatgactactggggtcagggaaccctggtcaccgtctcgagc

SEQ ID NO: 2127 - DNA, 354 bp, Homo sapiens
ggggtgcagctgttggagtctgggggaggcttggtacagcctggggggtccctgcgtctctcctgtgcagcctccggattcatctttgcttggtatgatatggggtgggcccgccaggctccagggaagggtctagagtgggtctcaaccattgacaacaagggtggtaagacatactacgcagactccgtgaagggccggttcaccatctcccgcgacaattccaagaacacgctgtatctgcaaatgaacagcctgcgtgccgaggacaccgcggtatattactgtgcgacagcggaggacgagccggggtatgactactggggtcagggaaccctggtcaccgtctcgagc

SEQ ID NO: 2128 - DNA, 354 bp, Homo sapiens; identical to SEQ ID NO: 2098

SEQ ID NO: 2129 - protein, 118 aa, Homo sapiens
EVQLLESGGGLVQPGGSLRLSCAASGFTFPKYDMMWVRQAPGKGLEWVSSIDHLGVNTYYADSVKGRFTISRDNSKNTLYLQMNSLRAEDTAVYYCAKESDWPSFDYWGQGTLVTVSS

SEQ ID NO: 2130 - protein, 116 aa, Homo sapiens
EVQLLESGGGLVQPGGSLRLSCAASGFTFDVYEMDWVRQAPGKGLEWVSSISAYGDQTYYADSVKGRFTISRDNSKNTLYLQMNSLRAEDTAVYYCAKSGTGFDYWGQGTLVTVSS

SEQ ID NO: 2131 - protein, 116 aa, Homo sapiens
EVQLLESGGGLVQPGGSLRLSCAASGFTFPDAEMDWVRQAPGKGLEWVSTISPEGTNTYYADSVKGRFTISRDNSKNTLYLQMNSLRAEDTAVYYCAKAGMSFDYWGQGTLVTVSS

SEQ ID NO: 2132 - protein, 116 aa, Homo sapiens
EVQLLESGGGLVQPGGSLRLSCAASGFTFPSDEMDWVRQAPGKGLEWVSAIDPKGSRTYYADSVKGRFTISRDNSKNTLYLQMNSLRAEDTAVYYCAKAGSGFDYWGQGTLVTVSS

SEQ ID NO: 2133 - protein, 116 aa, Homo sapiens
EVQLLESGGGLVQPGGSLRLSCAASGFTFGEYEMDWVRQAPGKGLEWVSSINSVGFLTYYADSVKGRFTISRDNSKNTLYLQMNSLRAEDTAVYYCAKAGSSFDYWGQGTLVTVSS

SEQ ID NO: 2134 - protein, 116 aa, Homo sapiens
EVQLLESGGGLVQPGGSLRLSCAASGFTFKEVEMDWVRQAPGKGLEWVSTIDGSGVGTYYADSVKGRFTISRDNSKNTLYLQMNSLRAEDTAVYYCAKGGTSFDYWGQGTLVTVSS

SEQ ID NO: 2135 - protein, 116 aa, Homo sapiens
EVQLLESGGGLVEPGGSLRLSCAASGFTFHESEMDWVRQAPGKGLEWVSTINGSGESTYYADSVKGRFTISRDNSKNTLYLQMNSLRAEDTAVYYCAKAGTSFDYWGQGTLVTVSS

SEQ ID NO: 2136 - protein, 116 aa, Homo sapiens
EVQLLESGGGLVQPGGSLRLSCAASGFTFHTMEMDWVRQAPGKGLEWVSTIDGLGTHTYYADSVKGRFTISRDNSKNTLYLQMNSLRAEDTAVYYCAKAGDSFDYWGQGTLVTVSS

SEQ ID NO: 2137 - protein, 116 aa, Homo sapiens
EVQLLESGGGLVQPGGSLRLSCAASGFTFSAYEMDWVRQAPGKGLEWVSSISQRGEFTYYADSVKGRFTISRDNSKNTLYLQMNSLRAEDTAVYYCAKSGTGFDYWGQGTLVTVSS

SEQ ID NO: 2138 - protein, 116 aa, Homo sapiens
EVQLLESGGGLVQPGGSLRLSCAASGFTFASHEMDWVRQAPGKGLEWVSAISGSGGSTYYADSVKGRFTISRDNSKNTLYLQMNSLRAEDTAVYYCAKAGDPFDYWGQGTLVTVSS

SEQ ID NO: 2139 - protein, 116 aa, Homo sapiens
EVQLLESGGGLVQPGGSLRLSCAASGFTFESTDMDWVRQAPGKGLEWVSTIGRSGLDTYYADSVKGRFTISRDNSKNTLYLQMNSLRAEDTAVYYCAKAYDPFDYWGQGTLVTVSS

SEQ ID NO: 2140 - protein, 116 aa, Homo sapiens
EVQLLESGGGLVQPGGSLRLSCAASGFTFMDSDMDWVRQAPGKGLEWVSTISPSGELTYYADSVKGRFTISRDNSKNTLYLQMNSLRAEDTAVYYCAKAYSPFDYWGQGTLVTVSS

SEQ ID NO: 2141 - protein, 123 aa, Homo sapiens
EVQLLESGGGLVQPGGSLRLSCAASGFTFENYDMMWVRQAPGKGLEWVSTITHHGIITYYADSVKGRFTISRDNSKNTLYLQMNSLRAEDTAVYYCAKEEDWTFLKTVVFDYWGQGTLVTVSS

SEQ ID NO: 2142 - protein, 117 aa, Homo sapiens
EVQLLESGGGLVQPGGSLRLSCAASGFTFGGYDMSWVRQAPGKGLEWVSSIDGVGPHTYYADSVKGRFTISRDNSKNTLYLQMNSLRAEDTAVYYCAKGFGLGFDYWGQGTLVTVSS

SEQ ID NO: 2143 - protein, 116 aa, Homo sapiens
EVQLLESGGGLVQPGGSLRLSCAASGFTFELEEMDWVRQAPGKGLEWVSSISGSGGSTYYADSVKGRFTISRDNSKNTLYLQMNSLRAEDTAVYYCAKAYTGFDYWGQGTLVTVSS

SEQ ID NO: 2144 - protein, 116 aa, Homo sapiens
EVQLLESGGGLVQPGGSLRLSCAASGFTFEDTEMDWVRQAPGKGLEWVSSISGNGNSTYYADSVKGRFTISRDNSKNTLYLQMNSLRAEDTAVYYCAKAFTPFDYWGQGTLVTVSS

SEQ ID NO: 2145 - protein, 116 aa, Homo sapiens
EVQLLESGGGLVQPGGSLRLSCAASGFTFPDAEMDWVRQAPGKGLEWVSTISDSGVHTYYADSVKGRFTISRDNSKNTLYLQMNSLRAEDTAVYYCAKAGTSFDYWGQGTLVTVSS

SEQ ID NO: 2146 - protein, 116 aa, Homo sapiens
EVQLLESGGGLVQPGGSLRLSCAASGFTFDNSEMDWVRQAPGKGLEWVSTISGKGSTTYYADSVKGRFTISRDNSKNTLYLQMNSLRAEDTAVYYCAKAGTGFDYWGQGTLVTVSS

SEQ ID NO: 2147 - protein, 116 aa, Homo sapiens
EVQLLESGGGLVQPGGSLRLSCAASGFTFQSSEMDWVRQAPGKGLEWVSTIGSSGDDTYYADSVKGRFTISRDNSKNTLYLQMNSLRAEDTAVYYCAKAFTSFDYWGQGTLVTVSS

SEQ ID NO: 2148 - protein, 116 aa, Homo sapiens
EVQLLESGGGLVQPGGSLRLSCAASGFTFPHSEMDWVRQAPGKGLEWVSSISGGGDTTYYADSVKGRFTISRDNSKNTLYLQMNSLRAEDTAVYYCAKAGTGFDYWGQGTLVTVSS

SEQ ID NO: 2149 - protein, 117 aa, Homo sapiens; identical to SEQ ID NO: 2142

SEQ ID NO: 2150 - protein, 116 aa, Homo sapiens
EVQLLESGGGLVQPGGSLRLSCAASGFTFGWYDMMWVRQAPGKGLEWVSGITFDGHSTYYADSVKGRFTISRDNSKNTLYLQMNSLRAEDTAVYYCAKEGVNFDYWGQGTLVTVSS

SEQ ID NO: 2151 - protein, 116 aa, Homo sapiens; identical to SEQ ID NO: 2139

SEQ ID NO: 2152 - protein, 116 aa, Homo sapiens
EVQLLESGGGLVQPGGSLRLSCAASGFTFYDYEMDWVRQAPGKGLEWVSTISATGDSTYYADSVKGRFTISRDNSKNTLYLQMNSLRAEDTAVYYCAKAYTSFDYWGQGTLVTVSS

SEQ ID NO: 2153 - protein, 116 aa, Homo sapiens
EVQLLESGGGLVQPGGSLRLSCAASGFTFKDYEMDWVRQAPGKGLEWVSAITPDGQTTYYADSVKGRFTISRDNSKNTLYLQMNSLRAEDTAVYYCAKAGTSFDYWGQGTLVTVSS

SEQ ID NO: 2154 - protein, 116 aa, Homo sapiens
EVQLLESGGGLVQPGGSLRLSCAASGFTFSDYEMDWVRQAPGKGLEWVSSIDNSGFSTYYADSVKGRFTISRDNSKNTLYLQMNSLRAEDTAVYYCAKAFSTFDYWGQGTLVTVSS

SEQ ID NO: 2155 - protein, 116 aa, Homo sapiens
EVQLLESGGGLVQPGGSLRLSCAASGFTFTNYEMDWVRQAPGKGLEWVSTINPTGQSTYYADSVKGRFTISRDNSKNTLYLQMNSLRAEDTAVYYCAKAFTPFDYWGQGTLVTVSS

SEQ ID NO: 2156 - protein, 116 aa, Homo sapiens
EVQLLESGGGLVQPGGSLRLSCAASGFTFANYEMDWVRQAPGKGLEWVSTISKMGADTYYADSVKGRFTISRDNSKNTLYLQMNSLRAEDTAVYYCAKAWSGFDYWGQGTLVTVSS

SEQ ID NO: 2157 - protein, 116 aa, Homo sapiens
EVQLLESGGGLVQPGGSLRLSCAASGFTFDNSEMDWVRQAPGKGLEWVSTISVHGADTYYADSVKGRFTISRDNSKNTLYLQMNSLRAEDTAVYYCAKAGTSFDYWGQGTLVTVSS

SEQ ID NO: 2158 - protein, 116 aa, Homo sapiens
EVQLLESGGGLVQPGGSLRLSCAASGFTFEMSEMDWVRQAPGKGLEWVSAISGSGGSTYYADSVKGRFTISRDNSKNTLYLQMNSLRAEDTAVYYCAKAGTPFDYWGQGTLVTVSS

SEQ ID NO: 2159 - protein, 116 aa, Homo sapiens
EVQLLESGGGLVQPGGSLRLSCAASGFTFKGSEMDWVRQAPGKGLEWVSTISADGRETYYADSVKGRFTISRDNSKNTLYLQMNSLRAEDTAVYYCAKSYTSFDYWGQGTLVTVSS

SEQ ID NO: 2160 - protein, 116 aa, Homo sapiens
EVQLLESGGGLVQPGGSLRLSCAASGFTFSIYEMDWVRQAPGKGLEWVSTISASGDTTYYADSVKGRFTISRDNSKNTLYLQMNSLRAEDTAVYYCAKAGSPFDYWGQGTLVTVSS

SEQ ID NO: 2161 - protein, 116 aa, Homo sapiens
EVQLLESGGGLVQPGGSLRLSCAASGFTFEMYEMDWVRQAPGKGLEWVSSIDLAGLHTYYADSVKGRFTISRDNSKNTLYLQMNSLRAEDTAVYYCAKAGTGFDYWGQGTLVTVSS

SEQ ID NO: 2162 - protein, 116 aa, Homo sapiens
EVQLLESGGGLVQPGGSLRLSCAASGFTFSHYEMDWVRQAPGKGLEWVSTIGRGGTNTYYADSVKGRFTISRDNSKNTLYLQMNSLRAEDTAVYYCAKGGTGFDYWGQGTLVTVSS

SEQ ID NO: 2163 - protein, 116 aa, Homo sapiens
EVQLLESGGGLVQPGGSLRLSCAASGFTFDSYEMDWVRQAPGKGLEWVSTIHPTGMNTYYADSVKGRFTISRDNSKNTLYLQMNSLRAEDTAVYYCAKAGNGFDYWGQGTLVTVSS

SEQ ID NO: 2164 - protein, 116 aa, Homo sapiens; identical to SEQ ID NO: 2161

SEQ ID NO: 2165 - protein, 116 aa, Homo sapiens
EVQLLESGGGLVQPGGSLRLSCAASGFTFPDVEMDWVRQAPGKGLEWVSSIDTSGGLTYYADSVKGRFTISRDNSKNTLYLQMNSLRAEDTAVYYCAKSYSPFDYWGQGTLVTVSS

SEQ ID NO: 2166 - protein, 116 aa, Homo sapiens
EVQLLESGGGLVQPGGSLRLSCAASGFTFESAEMDWVRQVPGKGLEWVSTISPSGHGTYYADSVKGRFTISRDNSKNTLYLQMNSLRAEDTAVYYCAKSGSGFDYWGQGTLVTVSS

SEQ ID NO: 2167 - protein, 116 aa, Homo sapiens; identical to SEQ ID NO: 2131

SEQ ID NO: 2168 - protein, 116 aa, Homo sapiens
EVQLLESGGGLVQPGGSLRLSCAASGFTFGDYQMDWVRQAPGKGLEWVSTINENGTMTYYADSVKGRFTISRDNSKNTLYLQMNSLRAEDTAVYYCAKAYSGFDYWGQGTLVTVSS

SEQ ID NO: 2169 - protein, 116 aa, Homo sapiens
EVQLLESGGGLVQPGGSLRLSCAASGFTFSSYGMDWVRQAPGKGLEWVSSISSDGLNTYYADSVKGRFTISRDNSKNTLYLQMNSLRAEDTAVYYCAKFYDPFDYWGQGTLVTVSS

SEQ ID NO: 2170 - protein, 116 aa, Homo sapiens
EVQLLESGGGLVQPGGSLRLSCAASGFTFKSYGMDWVRQAPGKGLEWVSAIGPTGRDTYYADSVKGRFTISRDNSKNTLYLQMNSLRAEDTAVYYCAKEYTPFDYWGQGTLVTVSS

SEQ ID NO: 2171 - protein, 116 aa, Homo sapiens
EVQLLESGGGLVQPGGSLRLSCAASGFTFDEYGMDWVRQAPGKGLEWVSTISPNGQSTYYADSVKGRFTISRDNSKNTLYLQMNSLRVEDTAVYYCAKEYDSFDYWGQGTLVTVSS

SEQ ID NO: 2172 - protein, 116 aa, Homo sapiens
EVQLLESGGGLVQPGGSLRLSCAASGFTFSDYDMDWVRQAPGKGLEWVSTIEGRGRKTYYADSVKGRFTISRDNSKNTLYLQMNSLRAEDTAVYYCAKAFTNFDYWGQGTLVTVSS

SEQ ID NO: 2173 - protein, 116 aa, Homo sapiens
EVQLLESGGGLVQPGGSLRLSCAASGFTFSWYDMDWVRQAPGKGLEWVSTITSHGIDTYYADSVKGRFTISRDNSKNTLYLQMNSLRAEDTAVYYCAKAFDPFDYWGQGTLVTVSS

SEQ ID NO: 2174 - protein, 116 aa, Homo sapiens
EVQLLESGGGLVQPGGSLRLSCAASGFTFDREEMDWVRQAPGKGLEWVSTILPSGRKTYYADSVKGRFTISRDNSKNTLYLQMNSLRAEDTAVYYCAKAYTGFRYWGQGTLVTVSS

SEQ ID NO: 2175 - protein, 116 aa, Homo sapiens
EVQLLESGGGLVQPGGSLRLSCAASGFTFDREEMDWVRQAPGKGREWVSTISPRGRTTYYADSVRGRFTISRDNSKNMLYLQMNGLRAEDTAVYYCAKAYTGFKYWGQGTLVTVSS

SEQ ID NO: 2176 - protein, 116 aa, Homo sapiens
EVQLLESGGGLVQPGGSLRLSCAASGFTFRDYEMDWVRQAPGKGREWVSSIGPSGSETWYADSVKGRFTISRDNSKNTLYLQMNSLRAEDTAVYYCAKAYTGFGYWGQGTLVTVSS

SEQ ID NO: 2177 - protein, 116 aa, Homo sapiens
EVQLLESGGGLVQPGGSLRLSCAASGFTFRDYEMDWIRQAPGKGLEWVSSIGPSGSFTRYADSVKGRFTISRDNSKNTLYLQMNSLRAEDTAVYYCAKAYTGFRYWGQGTLVTVSS

SEQ ID NO: 2178 - protein, 116 aa, Homo sapiens
EVQLLESGGGLVQPGGSLRLSCAASGFTFNLYSMDWVRQAPGKGLEWVSTIDRNGERTYYADSVKGRFTISRDNSKNTLYLQMNSLRAEDTAVYYCAKAFDGFDYWGQGTLVTVSS

SEQ ID NO: 2179 - protein, 120 aa, Homo sapiens
EVQLLESGGGLVQPGGSLRLSCAASGFTFKDYDMMWVRQAPGKGLEWVSSISDWGRRTYYADSVKGRFTISRDNSKNTLYLQMNSLRAEDTAVYYCAKEAAWAEGSFDYWGQGTLVTVSS

SEQ ID NO: 2180 - protein, 119 aa, Homo sapiens
EVQLLESGGGLVQPGGSLRLSCAASGFTFALYDMSWVRQAPGKGLEWVSTITPLGSPTYYADSVKGRFTISRDDSKNTLYLQMNSLRAEDTAVYYCAKVHSVENEFDYWGQGTLVTVSS

SEQ ID NO: 2181 - protein, 116 aa, Homo sapiens; identical to SEQ ID NO: 2130

SEQ ID NO: 2182 - protein, 116 aa, Homo sapiens; identical to SEQ ID NO: 2157

SEQ ID NO: 2183 - protein, 116 aa, Homo sapiens
EVQLLESGGGLVQPGGSLRLSCAASGFTFQDTEMDWVRQAPGKGLEWVSTIGPSGTSTYYADSVKGRFTISRDNSKNTLYLQMNSLRAEDTAVYYCAKSYSGFDYWGQGTLVTVSS

SEQ ID NO: 2184 - protein, 116 aa, Homo sapiens
EVQLLESGGGLVQPGGSLRLSCAASGFTFNDYEMDWVRQAPGKGLEWVSSISTNGMHTYYADSVKGRFTISRDNSKNTLYLQMNSLRAEDTAVYYCAKAFDPFDYWGQGTLVTVSS

SEQ ID NO: 2185 - protein, 116 aa, Homo sapiens
EVQLLESGGGLVQPGGSLRLSCAASGFTFSDHEMDWVRQAPGKGLEWVSSISPAGMSTYYADSVKGRFTISRDNSKNTLYLQMNSLRAEDTAVYYCAKGGDPFDYWGQGTLVTVSS

SEQ ID NO: 2186 - protein, 116 aa, Homo sapiens
EVQLLESGGGLVQPGGSLRLSCAASGFTFSRDEMDWVRQAPGKGLEWVSTIDGHGLRTYYADSVKGRFTISRDNSKNTLYLQMNSLRAEDTAVYYCAKAGSGFDYWGQGTLVTVSS

SEQ ID NO: 2187 - protein, 116 aa, Homo sapiens
EVQLLESGGGLVQPGGSLRLSCAASGFTFEKYEMDWVRQAPGKGLEWVSTISPDGMVTYYADSVKGRFTISRDNSKNTLYLQMNSLRAEDTAVYYCAKAASGFDYWGQGTLVTVSS

SEQ ID NO: 2188 - protein, 116 aa, Homo sapiens
EVQLLESGGGLVQPGGSLRLSCAASGFTFESAEMDWVRQAPGKGLEWVSAIERDGTTTYYADSVKGRFTISRDNSKNMLYLQMNSLRAEDTAVYYCAKAGTPFDYWGQGTLVTVSS

SEQ ID NO: 2189 - protein, 116 aa, Homo sapiens
EVQLLESGGGLVQPGGSLRLSCAASGFTFPESEMDWVRQAPGKGLEWVSTISPPGNLTYYADSVKGRFTISRDNSKNTLYLQMNSLRAEDTAVYYCAKAGEGFDYWGQGTLVTVSS

SEQ ID NO: 2190 - protein, 116 aa, Homo sapiens
EVQLLESGGGLVQPGGSLRLSCAASGFTFAGMEMDWVRQAPGKGLEWVSTISPGGQDTYYADSVKGRFTISRDNSKNTLYLQMNSLRAEDTAVYYCAKAGAPFDYWGQGTLVTVSS

SEQ ID NO: 2191 - protein, 116 aa, Homo sapiens
EVQLLESGGGLVQPGGSLRLSCAASGFTFAWYEMDWVRQAPGKGLEWVSTINNSGTKTYYADSVKGRFTISRDNSKNTLYLQMNSLRAEDTAVYYCAKAGEGFDYWGQGTLVTVSS

SEQ ID NO: 2192 - protein, 123 aa, Homo sapiens; identical to SEQ ID NO: 2141

SEQ ID NO: 2193 - protein, 116 aa, Homo sapiens
EVQLLESGGGLVQPGGSLRLSCAASGFTFAGYSMDWVRQAPGKGLEWVSTISPRGGGTYYADSVKGRFTISRDNSKNTLYLQMNSLRAEDTAVYYCAKEGTGFAYWGQGTLVTVSS

SEQ ID NO: 2194 - protein, 116 aa, Homo sapiens
EVQLLESGGGLVQPGGSLRLSCAASGFTFRRYDMDWVRQAPGKGLEWVSSITGSGAMTYYADSVKGRFTISRDNSKNTLYLQMNSLRAEDTAVYYCAKAGTGFDYWGQGTLVTVSS

SEQ ID NO: 2195 - protein, 116 aa, Homo sapiens
EVQLLESGGGLVQPGGSLRLSCAASGFTFGDYQMDWVRQAPGKGLEWVSSITGSGAMTYYADSVKGRFTISRDNSKNTLYLQMNSLRAEDTAVYYCAKAYTGFDYWGQGTLVTVSS

SEQ ID NO: 2196 - protein, 116 aa, Homo sapiens
EVQLLESGGGLVQPGGSLRLSCAASGFTFDREEMDWVRQAPGKGLEWVSTISPSGRKTYYADSVKGRFTISRDNSKNTLYLQMNSLRAEDTAVYYCAKHGTGFDYWGQGTLVTVSS

SEQ ID NO: 2197 - protein, 116 aa, Homo sapiens
EVQLLESGGGLVQPGGSLRLSCAASGFTFRDYEMDWVRQAPGKGLEWVSSIGPSGSETYYADSVKGRFTISRDNSKNTLYLQMNSLRAEDTAVYYCAKAYTSFDYWGQGTLVTVSS

SEQ ID NO: 2198 - protein, 116 aa, Homo sapiens
EVQLLESGGGLVQPGGSLRLSCAASGFTFSSYEMDWVRQAPGKGLEWVSTISADGVTTYYADSVKGRFTISRDNSKNTLYLQMNSLRAEDTAVYYCAKAFDAFDYWGQGTLVTVSS

SEQ ID NO: 2199 - protein, 116 aa, Homo sapiens
EVQLLESGGGLVQPGGSLRLSCAASGFTFDKSEMDWVRQAPGKGLEWVSTIDSKGLRTYYADSVKGRFTISRDNSKNTLYLQMNSLRAEDTAVYYCAKAFAGFDYWGQGTLVTVSS

SEQ ID NO: 2200 - protein, 116 aa, Homo sapiens
EVQLLESGGGLVQPGGSLRLSCAASGFTFFDYEMDWVRQAPGKGLEWVSTISRNGMVTYYADSVKGRFTISRDNSKNTLYLQMNSLRAEDTAVYYCAKAGTPFDYWGQGTLVTVSS

SEQ ID NO: 2201 - protein, 116 aa, Homo sapiens
EVQLLESGGGLVQPGGSLRLSCAASGFTFKDYEMDWVRQAPGKGLEWVSTIDSKGLRTYYADSVKGRFTISRDNSKNTLYLQMNSLRAEDTAVYYCAKAFAGFDYWGQGTLVTVSS

SEQ ID NO: 2202 - protein, 116 aa, Homo sapiens
EVQLLESGGGLVQPGGSLRLSCAASGFTFRDYEMDWVRQAPGKGLEWVSSIGPSGSETYYADSVKGRFTISRDNSKDTLYLQMNSLRAEDTAVYYCAKSGTGFDYWGQGTLVTVSS

SEQ ID NO: 2203 - protein, 116 aa, Homo sapiens
EVQLLESGGGLVQPGGSLRLSCAASGFTFAQYEMDWVRQAPGKGLEWVSSISHNGRHAYYADSVKGRFTISRDNSKNTLYLQMNSLRAEDTAVYYCAKSGDGFDYWGQGTLVTVSS

SEQ ID NO: 2204 - protein, 116 aa, Homo sapiens
EVQLLESGGGLVQPGGSLRLSCAASGFTFEWFEMDWVRQAPGKGLEWVSTISMGGDNTYYADSVKGRFTISRDNSKNTLYLQMNSLRAEDTAVYYCAKAGSAFDYWGQGTLVTVSS

SEQ ID NO: 2205 - protein, 116 aa, Homo sapiens
EVQLLESGGGLVQPGGSLRLSCAASGFTFMKYEMDWVRQAPGKGLEWVSSISSSGGSTYYADSVKGRFTISRDNSKNTLYLQMNSLRAEDTAVYYCAKSFTPFDYWGQGTLVTVSS

SEQ ID NO: 2206 - protein, 116 aa, Homo sapiens
EVQLLESGGGLVQPGGSLRLSCAASGFTFGHYEMDWVRQAPGKGLEWVSTISPNGITTYYADSVKGRFTISRDNSKNTLYLQMNSLRAEDTAVYYCAKASSGFDYWGQGTLVTVSS

SEQ ID NO: 2207 - protein, 116 aa, Homo sapiens
EVQLLESGGGLVQPGGSLRLSCAASGFTFPSYEMDWVRQAPGKGLEWVSSISPTGDRTYYADSVKGRFTISRDNSKNTLYLQMNSLRAEDTAVYYCAKSGTSFDYWGQGTLVTVSS

SEQ ID NO: 2208 - protein, 116 aa, Homo sapiens
EVQLLESGGGLVQPGGSLRLSCAASGFTFRDYEMDWVRQAPGKGLEWVSTISPSGRSTYYADSVKGRFTISRDNSKNTLYLQMNSLRAEDTAVYYCAKAYTGFRYWGQGTLVTVSS

SEQ ID NO: 2209 - protein, 108 aa, Homo sapiens
DIQMTQSPSSLSASVGDRVTITCRASKAIMGDLAWYQQKPGKAPKLLIGGGSVLQSGVPSRFSGSGSGTDFTLTISSLQPEDFATYYCRQGAMGSYTFGQGTKVEIKR

SEQ ID NO: 2210 - protein, 108 aa, Homo sapiens
DIQMTQSPSSLSASVGDRVTITCRASHFIAHGLSWYQQKPGKAPKLLISGVSVLQSGVPSRFSGSGSGTDFTLTISSLQPEDFATYYCRQGAMGSYTFGQGTKVEIKR

SEQ ID NO: 2211 - protein, 108 aa, Homo sapiens
DIQMTQSPSSLSASVGDRVTITCRASSPITDGLAWYQQKPGKAPKLLIDTGSRLQSGVPSRFSGSGSGTDFTLTISSLQPEDFATYYCRQGAMGSYTFGQGTKVEIKR

SEQ ID NO: 2212 - protein, 108 aa, Homo sapiens
DIQMTQSPSSLSASVGDRVTITCRASSVILNELHWYQQKPGKAPKLLISAVSRLQSGVPSRFSGSGSGTDFTLTISSLQPEDFATYYCLQTFWGPFTFGQGTKVEIKR

SEQ ID NO: 2213 - protein, 108 aa, Homo sapiens
DIQMTQSPSSLSASVGDRVTITCRASQPIENKLKWYQQKPGKAPKLLIYKTSYLQSGVPSRFSGSGSGTDFTLTISSLQPEDFATYYCQQNRQRPHTFGQGTKVEIKR

SEQ ID NO: 2214 - protein, 108 aa, Homo sapiens
DIQMTQSPSSLSASVGDRVTITCRASQGIQNNLNWYQQKPGKAPKLLIYRTSNLQSGVPSRFSGSGSGTDFTLTISSLQPEDFAAYYCQQTSARPYTFGQGTRVKIKR

SEQ ID NO: 2215 - protein, 108 aa, Homo sapiens
DIQMTQSPSSLSASVGDRVTITCRASSVIEDTLSWYQQKPGKAPKLLISGPSGLQSGVPSRFSGSGSGTDFTLTISSLQPEDFATYYCRQGAMGSYTFGQGTKVEIKR

SEQ ID NO: 2216 - protein, 108 aa, Homo sapiens
DIQMTQSPSSLSASVGDRVTITCRASREIIEPLVWYQQKPGKAPKLLIGVSSALQSGVPSRFSGSGSGTDFTLTISGLQPEDFATYYCRQGAMGSYTFGQGTKVEIKR

SEQ ID NO: 2217 - protein, 108 aa, Homo sapiens
DIQMTQSPSSLSASVGDRVTITCRASLVIDSELAWYQQKPGKAPKLLIGGVSGLQSGVPSRFSGSGSGTDFTLTISSLQPEDFATYYCRQGAMGSYTFGQGTKVEIKR

SEQ ID NO: 2218 - protein, 108 aa, Homo sapiens
DIQMTQSPSSLSASVGDRVTITCRASMMIDKELAWYQQKPGKAPKLLIVGGSGLQSGVPSRFSGSGSGTDFTLTISSLQPEDFATYYCRQGAMGSYTFGQGTKVEIKR

SEQ ID NO: 2219 - protein, 108 aa, Homo sapiens
DIQMTQSPSSLSASVGDRVTITCRASIPINEQLVWYQQKPGKAPMLLIGGGSRLQSGVPSRFSGSGSGTDFTLTISSLQPEDFATYYCRQGAVGSYTFGQGTKVEIKR

SEQ ID NO: 2220 - protein, 108 aa, Homo sapiens
DIQMTQSPSSLSASVGDRVTITCRASQSISSYLNWYQQKPGKAPKLLIYAASSLQSGVPSRFSGSGSGTDFTLTISSLQPEDFATYYCQQSYSTPNTFGQGTKVEIKR

SEQ ID NO: 2221 - protein, 108 aa, Homo sapiens
DIQMTQSPSSLSASVGDRVTITCRASNQIREPLSWYQQKPGKAPKLLIGGGSRLQSGVPSRFSGSGSGTDFTLTISSLQPEDFATYYCRQGAMGSYTFGQGTKVEIKR

SEQ ID NO: 2222 - protein, 108 aa, Homo sapiens
DIQMTQSPSSLSASVGDRVTITCRASKVIADDLVWYQQKPGKAPKLLIGSLSGLQSGVPSRFSGSGSGTDFTLTISSLQPEDFATYYCRQGAMGSYTFGQGTKVEIKR

SEQ ID NO: 2223 - protein, 108 aa, Homo sapiens; identical to SEQ ID NO: 2216

SEQ ID NO: 2224 - protein, 108 aa, Homo sapiens; identical to SEQ ID NO: 2218

SEQ ID NO: 2225 - protein, 108 aa, Homo sapiens
DIQMTQSPSSLSASVGDRVTITCRASTTIDTELSWYQQKPGKAPKLLISGYSVLQSGVPSRFSGSGSGTDFTLTISSLQPEDFATYYCRQGAMGSYTFGQGTKVEIKR

SEQ ID NO: 2226 - protein, 108 aa, Homo sapiens
DIQMTQSPSSLSASVGDRVTITCRASSWIADDLSWYQQKPGKAPKLLIGGVSGLQSGVPSRFSGSGSGTDFTLTISSLQPEDFATYYCRQGLLGSYTFGQGTKVEIKR

SEQ ID NO: 2227 - protein, 108 aa, Homo sapiens
DIQMTQSPSSLSASVGDRVTITCRASRNIDENLDWYQQKPGKAPKLLIRWGSRLQSGVPSRFSGSGSGTDFTLTISSLQPEDFATYYCRQGLFGSWTFGQGTKVEIKR

SEQ ID NO: 2228 - protein, 108 aa, Homo sapiens
DIQMTQSPSSLSASVGDRVTITCRASRSIEGELFWYQQKPGKAPKLLIRGASVLQSGVPSRFSGSGSGTDFTLTISSLQPEDFATYYCRQGRYGSFTFGQGTKVEIKR

SEQ ID NO: 2229 - protein, 108 aa, Homo sapiens
DIQMTQSPSSLSASVGDRVTITCRASQAIPWGLNWYQQKPGKAPKLLIYDVSSLQSGVPSRFSGSGSGTDFTLTISSLQPEDFATYYCQQDIHIPMTFGQGTKVEIKR

SEQ ID NO: 2230 - protein, 108 aa, Homo sapiens
DIQMTQSPSSLSASVGDRVTITCRASQHIGRWLSWYQQKPGKAPKLLIYRASTLQSGVPSRFSGSGSGTDFTLTISSLQPEDFATYYCQQDFGDPYTFGQGTKVGIKR

SEQ ID NO: 2231 - protein, 108 aa, Homo sapiens
DIQMTQSPSSLSASVGDRVTITCRASQNIFADLNWYQQKPGKAPKLLIYMGSRLQSGVPSRFSGSGSGTDFTLTISSLQPEDFATYYCQQDYKFPLTFGQGTKVEIKR

SEQ ID NO: 2232 - protein, 108 aa, Homo sapiens
DIQMTQSPSSLSASVGDRVTITCRASSDIGRMLSWYQQKPGKAPKLLIVGGSSLQSGVPSRFSGSGSGTDFTLTISSLQPEDFATYYCWQWAKPPTTFGQGTKVEIKR

SEQ ID NO: 2233 - protein, 108 aa, Homo sapiens; identical to SEQ ID NO: 2212

SEQ ID NO: 2234 - protein, 108 aa, Homo sapiens; identical to SEQ ID NO: 2231

SEQ ID NO: 2235 - protein, 108 aa, Homo sapiens; identical to SEQ ID NO: 2213

SEQ ID NO: 2236 - protein, 108 aa, Homo sapiens
DIQMTQSPSSLSASVGDRVTITCRASPNIAVDLAWYQQKPGKAPKLLIRGVSRLQSGVPSRFSGSGSGTDFTLTISSLQPEDFATYYCRQGAMGSYTFGQGTKVEIKR

SEQ ID NO: 2237 - protein, 108 aa, Homo sapiens
DIQMTQSPSSLSASVGDRVTITCRASQNIAKKLAWYQQKPGKAPKLLIVGASLLQSGVPSRFSGSGSGTDFTLTISSLQPEDFATYYCRQGAMGSYTFGQGTKVEIKR

SEQ ID NO: 2238 - protein, 108 aa, Homo sapiens
DIQMTQSPSSLSASVGDRVTITCRASQDIDMYLNWYQQKPGKAPKLLIYRGSQLQSRVPSRFSGSGSGTDFTLTISSLQPEDLATYYCQQLASYPVTFGQGTKVEIKR

SEQ ID NO: 2239 - protein, 108 aa, Homo sapiens
DIQMTQSPSSLSASVGDRVTITCRASQSISSYLNWYQQKPGQAPKLLIAAASFLQSGVPSRFSGSGSGTDFTLTISSLQPEDFATYYCGQGARGPTTFGQGTRVEIKR

SEQ ID NO: 2240 - protein, 108 aa, Homo sapiens
DIQMTQSPSSLSASVGDRVTITCRASSVILNELHWYQQKPGKAPKLLISAVSRLQSGVPSRFSGSGSGTDFTLTISSLQPEDFATYYCLQTFWGPYTFGQGTKVEIKR

SEQ ID NO: 2241 - protein, 116 aa, Homo sapiens
EVQLLESGGGLVQPGGSLRLSCAASGFTFDREEMDWVRQAPGKGLEWVSTISPSGRKTYYADSVKGRFTISRDNSKNTLYLQMNSLRAEDTAVYYCAKAYTGFDYWGQGTLVTVSS

SEQ ID NO: 2242 - protein, 116 aa, Homo sapiens
EVQLLESGGGLVQPGGSLRLSCAASGFTFRDYEMDWVRQAPGKGLEWVSTISADGRETYYADSVKGRFTISRDNSKNTLYLQMNSLRAEDTAVYYCAKAYTSFDYWGQGTLVTVSS

SEQ ID NO: 2243 - protein, 116 aa, Homo sapiens
EVQLLESGGGLVQPGGSLRLSCAASGFTFKGSEMDWVRQAPGKGLEWVSTISADGRETYYADSVKGRFTISRDNSKNTLYLQMNSLRAEDTAVYYCAKAYTSFDYWGQGTLVTVSS

SEQ ID NO: 2244 - protein, 116 aa, Homo sapiens
EVQLLESGGGLVQPGGSLRLSCAASGFTFDSYEMDWVRQAPGKGLEWVSTISPSGRKTYYADSVKGRFTISRDNSKNTLYLQMNSLRAKDTAVYYCAKAGTSFDYWGQGTLVTVSS

SEQ ID NO: 2245 - protein, 116 aa, Homo sapiens; identical to SEQ ID NO: 2243

SEQ ID NO: 2246 - protein, 116 aa, Homo sapiens
EVQLLESGGGLVQPGGSLRLSCAASGFTFSSYEMDWVRRAPGKGLEWVSTISADGRETYYADSVKGRFTISRDNSKNTLYLQMNSLRAGDTAVYYCAKAFDAFDHWGQGTLVTVSS

SEQ ID NO: 2247 - protein, 116 aa, Homo sapiens
EVQLLESGGGLVQPGGSLRLSCAASGFTFELGEMDWVRQAPGKGLEWVSSISGSGGSTYYADSVKGRFTISRDNSKNTLYLQMNSLRAEDTAVYYCAKAYTGFDYWGQGTLVTVSS

SEQ ID NO: 2248 - protein, 116 aa, Homo sapiens
EVQLLESGGGLVQPGGSLRLSCAASGFTFELEEMDWVRQAPGKGLEWVSSISGSGGSTYYADSVKGRFTTSRDNSKNTLYLQMNSLRAEDTAVYYCAKAYTGFDYWGQGTLVTVSS

SEQ ID NO: 2249 - protein, 116 aa, Homo sapiens
EVQLLESGGGLVQPGGSLRLSCAASGFTFDREEMDWVRQAPGKGLEWVSTISPSGRKTYYADSVKGRFTISRDNSKNTLYLQMNSLRAEDTAVYYCAKAYDPFDYWGQGTLVTVSS

SEQ ID NO: 2250 - protein, 116 aa, Homo sapiens
EVQLLESGGGLVQPGGSLRLSCAASGFTFDREEMDWVRQAPGKGLEWVSTISPSGRKTYYADSVKGRFTISRDNSKNTLYLQMNSLRAEDTAVYYCAKQGTGFDYWGQGTLVTVSS

SEQ ID NO: 2251 - protein, 116 aa, Homo sapiens
EVQLLESGGGLVQPGGSLRLSCAASGFTFRDYEMDWVRQAPGKGLEWVSSIGPSGSETYYADSVKGRFTISRDNSTNTLYLQMNSLRAEDTAVYYCAKSYTSFDYWGQGTLVTVSS

SEQ ID NO: 2252 - protein, 116 aa, Homo sapiens
ELQLLESGGGLVQPGGSLRLSCAASGFTFRDYEMDWVRQAPGKGLEWVSSIGPSGSETYYADSVKGRFTISRDNSKNTLYLQMNSLRAEDTAVYYCAKAYTSFDYWGQGTLVTVSS

SEQ ID NO: 2253 - protein, 116 aa, Homo sapiens
EVQLLESGGGLVQPGGSLRLSCAASGFTFSSYEMDWVRQAPGKGLEWVSTISADGVTTYYTDSVKGRFTISRDNSKNTLYLQMNSLRAEDTAVYYCAKAFDAFDYWGQGTLVTVSS

SEQ ID NO: 2254 - protein, 116 aa, Homo sapiens
EVQLLESGGGLVQPGGSLRLSCAASGFTFDREEMDWVRQAPGKGLEWVSTISPRGRGTYYADSVKGRFTISRDNSKNTLYLQMNSLRAEDTAVYYCAKAYTGFRYWGQGTLVTVSS

SEQ ID NO: 2255 - protein, 116 aa, Homo sapiens
EVQLLESGGGLVQPGGSLRLSCAASGFTFDREEMDWVRQAPGKGLEWVSTISPLGRSTYYADSVKGRFTISRDNSKNTLYLQMNSLRAEDTAVYYCAKAYTGFRYWGQGTLVTVSS

SEQ ID NO: 2256 - protein, 116 aa, Homo sapiens
EVQLLESGGGLVQPGGSLRLSCAASGFTFRDYEMDWVRQAPGKGLEWVSSIGPSGSETYYADSVKGRFTISRDNSKNTLYLQMNSLRAEDTAVYYCAKAYTGFGYWGQGTLVTVSS

SEQ ID NO: 2257 - protein, 116 aa, Homo sapiens; identical to SEQ ID NO: 2174

SEQ ID NO: 2258 - protein, 116 aa, Homo sapiens
EVQLLESGGGLVQPGGSLRLSCAASGFTFRDYEMDWVRQAPGKGREWVSSIGPGGSETYYADSVKGRFTISRDNSKNTLYLQMNSLRAEDTAVYYCAKAYTGFKYWGQGTLVTVSS

SEQ ID NO: 2259 - protein, 116 aa, Homo sapiens
EVQLLESGGGLVQPGGSLRLSCAASGFTFRDYEMDWVRQAPGKGLEWVSTIHPSGRKTYYADSVKGRFTISRDNFKNTLYLQMNSLRAEDTAVYYCAKAYTGFGYWGQGTLVTVSS

SEQ ID NO: 2260 - protein, 116 aa, Homo sapiens
EVQLLESGGGLVQPGGSLRLSCAASGFTFRDYEMDWVRQAPGKGLEWVSSISPNGSETNYADSVKGRFTISRDNSKNTLYLQMNSLRAEDTAVYYCAKAYTSFDYWGQGTLVTVSS

SEQ ID NO: 2261 - protein, 116 aa, Homo sapiens; identical to SEQ ID NO: 2176

SEQ ID NO: 2262 - protein, 116 aa, Homo sapiens
EVQLLESGGGLVQPGGSLRLSCAASGFTFRDYEMDWVRQAPGKGLEWVSSIGPSGSETWYADSVKGRFTISRDNSKNTLYLQMNSLRAEDTAVYYCAKAYTGFGYWGQGTLVTVSS

SEQ ID NO: 2263 - protein, 116 aa, Homo sapiens; identical to SEQ ID NO: 2176

SEQ ID NO: 2264 - protein, 116 aa, Homo sapiens
EVQLLESGGGLVQPGGSLRLSCAASGFTFDREEMDWVRQAPGKGLEWVSTISPGGRKTYYADSVKGRFTISRDNSKNTLYLQMNSLRAEDTAVYYCAKAYTGFRYWGQGTLVTVSS

SEQ ID NO: 2265 - protein, 116 aa, Homo sapiens; identical to SEQ ID NO: 2264

SEQ ID NO: 2266 - protein, 116 aa, Homo sapiens
EVQLLQSGGGLVQPGGSLRLSCAASGFTFDREEMDWVRQAPGKGLEWVSTISPNGRTTYYADSVKGRFTISRDNSKNTLYLQMNSLRAEDTAVYYCAKAYTGFRYWGQGTLVTVSS

SEQ ID NO: 2267 - protein, 116 aa, Homo sapiens
EVQLLESGGGLVQPGGSLRLSCAASGFTFDREEMDWVRQAPGKGLEWVSTISPNGRKTYYADSVKGRFTISRDNSKNTLYLQMNSLRAEDTAVYYCAKAYTGFRYWGQGTLVTVSS

SEQ ID NO: 2268 - protein, 116 aa, Homo sapiens; identical to SEQ ID NO: 2175

SEQ ID NO: 2269 - protein, 116 aa, Homo sapiens
EVQLLESGGGLVQPGGSLRLSCAASGFTFDREEMDWVRQAPGKGLEWVSTISPSGRKTWYADSVKGRFTISRDNSKNTLYLQMNSLRAKDTAVYYCAKAYTGFRYWGQGTLVTVSS

SEQ ID NO: 2270 - protein, 116 aa, Homo sapiens
EVQLLESGGGLVQPGGSLRLSCAASGFTFDREEMDWVRQAPGKGLEWVSTISPAGRGTYYADSVKGRFTISRDNSKNTLYLQMNGLRAEDTAVYYCAKAYTGFGYWGQGTLVTVSS

SEQ ID NO: 2271 - protein, 116 aa, Homo sapiens; identical to SEQ ID NO: 2254

SEQ ID NO: 2272 - protein, 116 aa, Homo sapiens; identical to SEQ ID NO: 2175

SEQ ID NO: 2273 - protein, 116 aa, Homo sapiens; identical to SEQ ID NO: 2208

SEQ ID NO: 2274 - protein, 116 aa, Homo sapiens
EVQLLESGGGLVQPGGSMRLSCAASGFTFRDYEMDWVRQAPGKGREWVSSIGPSGSETWYADSVKGRFTISRDNSKNTLYLQMNSLRAEDTAVYYCAKAYTGFGYWGQGTLVTVSS

SEQ ID NO: 2275 - protein, 116 aa, Homo sapiens
EVQLLESGGGLVQPGGSLRLSCAASGFTFDREEMDWVRQAPGKGREWVSTISPSGRKTWYADSVKGRFTISRDNSKNTLYLQMNGLRAEDTAVYYCAKAYTGFRYWGQGTLVTVSS

SEQ ID NO: 2276 - protein, 116 aa, Homo sapiens; identical to SEQ ID NO: 2177

SEQ ID NO: 2277 - protein, 116 aa, Homo sapiens; identical to SEQ ID NO: 2176

SEQ ID NO: 2278 - protein, 116 aa, Homo sapiens
EVQLLESGGGLVQPGGSLRLSCAASGFTFRDYEMDWVRQAPGKGLEWVSTISPSGRRTYYADSVKGRFTISRDNSKNTLYLQMNSLRAEDTAVYYCAKAYTGFHYWGQGTLVTVSS

SEQ ID NO: 2279 - protein, 116 aa, Homo sapiens; identical to SEQ ID NO: 2177

SEQ ID NO: 2280 - protein, 108 aa, Homo sapiens; identical to SEQ ID NO: 2212

SEQ ID NO: 2281 - protein, 118 aa, Homo sapiens
EVQLLESGGGLVQPGGSLRLSCAASGFIFAWYDMGWARQAPGKGLEWVSSIDWRGDQTYYADSVKGRFTISRDNSKNTLYLQMNSLRAEDTAVYYCATAEDEPGYDYWGQGTLVTVSS

SEQ ID NO: 2282 - protein, 118 aa, Homo sapiens
EVQLLESGGGLVQPGGSLRLSCAASGFIFAWYDMGWARQAPGKGLEWVSSIDWKGGKTYYADSVKGRFTISRDNSKNTLYLQMNSLRAEDTAVYYCATAEDEPGYDYWGQGTLVTVSS

SEQ ID NO: 2283 - protein, 118 aa, Homo sapiens
GVQLLESGGGLVQPGGSLRLSCAASGFIFAWYDMGWVRQAPGKGLEWVSSIDWHGEVEYYADSVKGRFTISRDNSKNTLYLQMNSLRAEDTAVYYCATAEDEPGYDYWGQGTLVTVSS

SEQ ID NO: 2284 - protein, 118 aa, Homo sapiens
EVQLLESGGGLVQPGGSLRLSCAASGFIFAWYDMGWVRQAPGKGLEWVSSIDWHGKITYYADSVKGRFTISRDNSKNTLYLQMNSLRAEDTAVYYCATAEDEPGYDYWGQGTLVTVSS

SEQ ID NO: 2285 - protein, 118 aa, Homo sapiens
EVQLLESGGGLVQPGGSLRLSCAASGFIFAWYDMGWVRQAPGKGLEWVSSIDWKGMETYYADSVKGRFTISRDNSKNTLYLQMNSLRAEDTAVYYCATAEDEPGYDYWGQGTLVTVSS

SEQ ID NO: 2286 - protein, 118 aa, Homo sapiens
EVQLLESGGGLVQPGGSLRLSCAASGFAFAAYDMGWVRQAPGKGLEWVSSIDWKGMETYYADSVKGRFTISRDNSKNTLYLQMNSLRAEDTAVYYCATAEDEPGYDYWGQGTLVTVSS

SEQ ID NO: 2287 - protein, 118 aa, Homo sapiens
GVQLLESGGGLVQPGGSLRLSCAASGFIFAVYDMGWARQAPGKGLEWVSSINDGGNVTYYADSVKGRFTISRDNSKNTLYLQMNSLRAEDTAVYYCATAEDEPGYDYWGQGTLVTVSS

SEQ ID NO: 2288 - protein, 118 aa, Homo sapiens
GVQLLESGGGLVQPGGSLRLSCAASGFIFAVYDMGWARQAPGKGLEWVSSINDGGNVTYYADSVKGRFTISRDNSKNTLYLQMNSLRAEDTAVYYCATAEDEPGYDYRGQGTLVTVSS

SEQ ID NO: 2289 - protein, 118 aa, Homo sapiens
EVQLLESGGGLIQPGGSLRLSCAASGFIFAVYDMGWARQAPGKGLEWVSSINDGGNVTYYADSVKGRFTISRDNSKNTLYLQMNSLRAEDTAVYYCATAEDEPGYDYRGQGTLVTVSS

SEQ ID NO: 2290 - protein, 118 aa, Homo sapiens
GVQLLESGGGLVQPGGSLRLSCAASGFIFAWYDMMWARQAPGKGLEWVSSINDGGNVTYYADSVKGRFTISRDNSKNTLYLQMNSLRAEDTAVYYCATAEDEPGYDYWGQGTLVTVSS

SEQ ID NO: 2291 - protein, 118 aa, Homo sapiens
GVQLLESGGGLVQPGGSLRLSCAASGFIFAWYDMGWVRQAPGKGLEWVSSINDHGKITYYADSVKGRFTISRDNSKNTLYLQMNSLRAEDTAVYYCATAEDEPGYDYWGQGTLVTVSS

SEQ ID NO: 2292 - protein, 118 aa, Homo sapiens
GVQLLESGGGLVQPGGSLRLSCAASGFIFAWYDMGWVRQAPGKGLEWVSSINDTGNVTYYADSVKGRFTISRDNSKNTLYLQMNSLRAEDTAVYYCATAEDEPGYDYWGQGTLVTVSS

SEQ ID NO: 2293 - protein, 118 aa, Homo sapiens
GVQLLESGGGLVQPGGSLRLSCAASGFIFAWYDMGWVRQAPGKGLEWVSSINDKGGKTYYADSVKGRFTISRDNSKNTLYLQMNSLRAEDTAVYYCATAEDEPGYDYWGQGTLVTVSS

SEQ ID NO: 2294 - protein, 118 aa, Homo sapiens
GVQLLESGGGLVQPGGSLRLSCAASGFIFAWYDMGWARQAPGKGLEWVSSIDWKGGKTYYADSVKGRFTISRDNSKNTLYLQMNSLRAEDTAVYYCATAEDEPGFDYWGQGTLVTVSS

SEQ ID NO: 2295 - protein, 118 aa, Homo sapiens
GVQLLESGGGLVQPGGSLRLSCAASGFIFAVYDMGWARQAPGKGLEWVSSIDWKGMETYYADSVKGRFTISRDNSKNTLYLQMNSLRAEDTAVYYCATAEDEPGYDYWGQGTLVTVSS

SEQ ID NO: 2296 - protein, 118 aa, Homo sapiens
GVQLLESGGGLVQPGGSLRLSCAASGFIFAWYDMGWVRQAPGKGLEWVSSINDKGMETYYADSVKGRFTISRDNSKNTLYLQMNSLRAEDTAVYYCATAEDEPGYDYWGQGTLVTVSS

SEQ ID NO: 2297 - protein, 118 aa, Homo sapiens
GVQLLESGGGLVQPGGSLRLSCAASGFIFAWYDMGWVRQAPGKGLEWVSSINDRGDQTYYADSVKGRFTISRDNSKNTLYLQMNSLRAEDTAVYYCATAEDEPGYDYWGQGTLVTVSS

SEQ ID NO: 2298 - protein, 118 aa, Homo sapiens
GVQLLESGGGLVQPGGSLRLSCAASGFIFAWYDMGWVRQAPGKGLEWVSSINDQGNTTYYADSVKGRFTISRDNSKNTLYLQMNSLRAEDTAVYYCATAEDEPGYDYWGQGTLVTVSS

SEQ ID NO: 2299 - protein, 118 aa, Homo sapiens
GVQLLESGGGLVQPGGSLRLSCAASGFIFAAYAMGWVRQAPGKGLEWVSSIDWKGMETYYADSVKGRFTISRDNSKNTLYLQMNSLRAEDTAVYYCATAEDEPGYDYWGQGTLVTVSS

SEQ ID NO: 2300 - protein, 118 aa, Homo sapiens
GVQLLESGGGLVQPGGSLRLSCAASGFIFAAYAMAWVRQAPGKGLEWVSSIDWKGMETYYADSVKGRFTISRDNSKNTLYLQMNSLRAEDTAVYYCATAEDEPGYDYWGQGTLVTVSS

SEQ ID NO: 2301 - protein, 118 aa, Homo sapiens
GVQLLESGGGLVQPGGSLRLSCAASGFIFAWYDMGWVRQAPGKGLEWVSSIDAAGAETYYADSVKGRFTISRDNSKNTLYLQMNSLRAEDTAVYYCATAEDEPGYDYWGQGTLVTVSS

SEQ ID NO: 2302 - protein, 118 aa, Homo sapiens
GVQLLESGGGLVQPGGSLRLSCAASGFIFAWYDMGWVRQAPGKGLEWVSSIDWAGAATYYADSVKGRFTISRDNSKNTLYLQMNSLRAEDTAVYYCATAEDEPGYDYWGQGTLVTVSS

SEQ ID NO: 2303 - protein, 118 aa, Homo sapiens
GVQLLESGGGLVQPGGSLRLSCAASGFIFAWYDMGWVRQAPGKGLEWVSSIDWKGMETYYADSVKGRFTISRDNSKNTLYLQMNSLRAEDTAVYYCATAAAEPGYDYWGQGTLVTVSS

SEQ ID NO: 2304 - protein, 118 aa, Homo sapiens
GVQLLESGGGLVQPGGSLRLSCAASGFIFAWYDMGWVRQAPGKGLEWVSSIDWKGMETYYADSVKGRFTISRDNSKNTLYLQMNSLRAEDTAVYYCATAAAAPGYDYWGQGTLVTVSS

SEQ ID NO: 2305 - protein, 118 aa, Homo sapiens
GVQLLESGGGLVQPGGSLRLSCAASGFIFAWYDMGWVRQAPGKGLEWVSSIDWKGMETYYADSVKGRFTISRDNSKNTLYLQMNSLRAEDTAVYYCATAEAAAGYDYWGQGTLVTVSS

SEQ ID NO: 2306 - protein, 118 aa, Homo sapiens
GVQLLESGGGLVQPGGSLRLSCAASGFIFAWYDMGWVRQAPGKGLEWVSSIDWKGMETYYADSVKGRFTISRDNSKNTLYLQMNSLRAEDTAVYYCATAEDAAAYDYWGQGTLVTVSS

SEQ ID NO: 2307 - protein, 118 aa, Homo sapiens
GVQLLESGGGLVQPGGSLRLSCAASGAAAAWYDMGWVRQAPGKGLEWVSSIDWKGMETYYADSVKGRFTISRDNSKNTLYLQMNSLRAEDTAVYYCATAEDEPGYDYWGQGTLVTASS

SEQ ID NO: 2308 - protein, 118 aa, Homo sapiens
GVQLLESGGGLVQPGGSLRLSCAASGFAFAAYDMGWVRQAPGKGLEWVSSIDWKGMETYYADSVKGRFTISRDNSKNTLYLQMNSLRAEDTAVYYCATAEDEPGYDYWGQGTLVTVSS

SEQ ID NO: 2309 - protein, 118 aa, Homo sapiens
GVQLLESGGGLVQPGGSLRLSCAASGFIFAWYDMGWVRQAPGKGLEWVSAIAAKGMETYYADSVKGRFTISRDNSKNTLYLQMNSLRAEDTAVYYCATAEDEPGYDYWGQGTLVTVSS

SEQ ID NO: 2310 - protein, 118 aa, Homo sapiens
GVQLLESGGGLVQPGGSLRLSCAASGFIFAWYDMGWVRQAPGKGLEWVSSIAAAGMETYYADSVKGRFTISRDNSKNTLYLQMNSLRAEDTAVYYCATAEDEPGYDYWGQGTLVTVSS

SEQ ID NO: 2311 - protein, 118 aa, Homo sapiens
GVQLLESGGGLVQPGGSLRLSCAASGFIFAWYDMGWVRQAPGKGLEWVSSINDGGEVTYYADSVKGRFTISRDNSKNTLYLQMNSLRAEDTAVYYCATAEDEPGYDYWGQGTLVTVSS

SEQ ID NO: 2312 - protein, 118 aa, Homo sapiens
GVQLLESGGGLVQPGGSLRLSCAASGFIFAWYDMGWVRQAPGKGLEWVSSIDWRGDQTYYADSVKGRFTISRDNSKNTLYLQMNSLRAEDTAVYYCATAEDEPGYDYWGQGTLVTVSS

SEQ ID NO: 2313 - protein, 118 aa, Homo sapiens
GVQLLESGGGLVQPGGSLRLSCAASGFIFAWYDMGWVRQAPGKGLEWVSSINDRGEVTYYADSVKGRFTISRDNSKNTLYLQMNSLRAEDTAVYYCATAEDEPGYDYWGQGTLVTVSS

SEQ ID NO: 2314 - protein, 118 aa, Homo sapiens
GVQLLESGGGLVQPGGSLRLSCAASGFIFAWYDMKWARQAPGKGLEWVSSIDWHGNVTYYADSVKGRFTISRDNSKNTLYLQMNSLRAEDTAVYYCATAEDEPGYDYWGQGTLVTVSS

SEQ ID NO: 2315 - protein, 118 aa, Homo sapiens
GVQLLESGGGLVQPGGSLRLSCAASGFIFAWYDMGWVRQAPGKGLEWVSSINDGGNVKYYADSVKGRFTISRDNSKNTLYLQMNSLRAEDTAVYYCATAEDEPGYDYWGQGTLVTVSS

SEQ ID NO: 2316 - protein, 118 aa, Homo sapiens
GVQLLESGGGLVQPGGSLRLSCAASGFIFAWYDMGWVRQAPGKGLEWVSSINDGGNVIYYADSVKGRFTISRDNSKNTLYLQMNSLRAEDTAVYYCATAEDEPGYDYWGQGTLVTVSS

SEQ ID NO: 2317 - protein, 118 aa, Homo sapiens
GVQLLESGGGLVQPGGSLRLSCAASGFIFAWYDMGWVRQAPGKGLEWVSSIDWKGGKTYYADSVKGRFTISRDNSKNTLYLQMNSLRAEDTAVYYCATAEDEPGYDYWGQGTLVTVSS

SEQ ID NO: 2318 - protein, 118 aa, Homo sapiens
GVQLLESGGGLVQPGGSLRLSCAASGFIFAWYDMMWARQAPGKGLEWVSSIDWKGMETYYADSVKGRFTISRDNSKNTLYLQMNSLRAEDTAVYYCATAEDEPGYDYWGQGTLVTVSS

SEQ ID NO: 2319 - protein, 118 aa, Homo sapiens
GVQLLESGGGLVQPGGSLRLSCAASGFIFAWYDMGWARQAPGKGLEWVSSIDWKGGKTYYADSVKGRFTISRDNSKNTLYLQMNSLRDEDTAVYYCATAEDEPGYDYWGQGTLVTVSS

SEQ ID NO: 2320 - protein, 118 aa, Homo sapiens
EVQLVESGGGLVQPGGSLRLSCAASGFIFAWYDMGWARQAPGKGLEWVSSIDWKGGKTYYADSVKGRFTISRDNSKNTLYLQMTSLRAEDTAVYYCATAEDEPGYDYWGQGTLVTVSS

SEQ ID NO: 2321 - protein, 118 aa, Homo sapiens; identical to SEQ ID NO: 2294

SEQ ID NO: 2322 - protein, 118 aa, Homo sapiens
EVQLVESGGGLVKPGGSLRLSCAASGFIFAWYDMGWARQAPGKGLEWVSSIDWKGGKTYYAAPVKGRFTISRDDSKNTLYLQMNSLKTEDTAVYYCATAEDEPGYDYWGQGTLVTVSS

SEQ ID NO: 2323 - protein, 118 aa, Homo sapiens
GVQLLESGGGLVQPGGSLRLSCAASGFIFAWYDMGWVRQAPGKGLEWVSSIDWKGGKTYYADSVKGRFTISRDNSKNTLYLQMNSLRAEDTAVYYCATAEDEPGFDYWGQGTLVTVSS

SEQ ID NO: 2324 - protein, 118 aa, Homo sapiens
GVQLLESGGGLVQPGGSLRLSCAASGFIFAWYDMMWARQAPGKGLEWVSSIDWHGEVTYYADSVKGRFTISRDNSKNTLYLQMNSLRAEDTAVYYCATAEDEPGYDYWGQGTLVTVSS

SEQ ID NO: 2325 - protein, 118 aa, Homo sapiens; identical to SEQ ID NO: 2282

SEQ ID NO: 2326 - protein, 118 aa, Homo sapiens
EVQLLESGGGLVQPGGSLRLSCAASGFIFAWYDMGWVRQAPGKGLEWVSSIDWKGGKTYYADSVKGRFTISRDNSKNTLYLQMNSLRAEDTAVYYCATAEDEPGYDYWGQGTLVTVSS

SEQ ID NO: 2327 - protein, 118 aa, Homo sapiens
QVQLLESGGGLVQPGGSLRLSCAASGFIFAWYDMGWARQAPGKGLEWVSSIDWKGGKTYYADSVKGRFTISRDNSKNTLYLQMNSLRAEDTAVYYCATAEDEPGYDYWGQGTLVTVSS

SEQ ID NO: 2328 - protein, 118 aa, Homo sapiens
QVQLLESGGGLVQPGGSLRLSCAASGFIFAWYDMGWVRQAPGKGLEWVSSIDWKGGKTYYADSVKGRFTISRDNSKNTLYLQMNSLRAEDTAVYYCATAEDEPGYDYWGQGTLVTVSS

SEQ ID NO: 2329 - protein, 118 aa, Homo sapiens
GVQLLESGGGLVQPGGSLRLSCAASGFIFAWYDMMWVRQAPGKGLEWVSSIDWHGNVTYYADSVKGRFTISRDNSKNTLYLQMNSLRAEDTAVYYCATAEDEPGYDYWGQGTLVTVSS

SEQ ID NO: 2330 - protein, 118 aa, Homo sapiens
GVQLLESGGGLVQPGGSLRLSCAASGFIFAWYDMGWVRQAPGKGLEWVSSINDGGNVGYYADSVKGRFTISRDNSKNTLYLQMNSLRAEDTAVYYCATAEDEPGYDYWGQGTLVTVSS

SEQ ID NO: 2331 - protein, 118 aa, Homo sapiens
GVQLLESGGGLVQPGGSLRLSCAASGFIFAWYDMGWVRQAPGKGLEWVSSINDGGNVWYYADSVKGRFTISRDNSKNTLYLQMNSLRAEDTAVYYCATAEDEPGYDYWGQGTLVTVSS

SEQ ID NO: 2332 - protein, 118 aa, Homo sapiens
GVQLLESGGGLVQPGGSLRLSCAASGFIFAWYDMGWVRQAPGKGLEWVSSINDGGNVMYYADSVKGRFTISRDNSKNTLYLQMNSLRAEDTAVYYCATAEDEPGYDYWGQGTLVTVSS

SEQ ID NO: 2333 - protein, 118 aa, Homo sapiens
GVQLLESGGGLVQPGGSLRLSCAASGFIFAWYDMGWVRQAPGKGLEWVSSINDGGNVRYYADSVKGRFTISRDNSKNTLYLQMNSLRAEDTAVYYCATAEDEPGYDYWGQGTLVTVSS

SEQ ID NO: 2334 - protein, 118 aa, Homo sapiens
GVQLLESGGGLVQPGGSLRLSCAASGFIFAWYDMGWVRQAPGKGLEWVSSINDGGNVQYYADSVKGRFTISRDNSKNTLYLQMNSLRAEDTAVYYCATAEDEPGYDYWGQGTLVTVSS

SEQ ID NO: 2335 - protein, 118 aa, Homo sapiens
GVQLLESGGGLVQPGGSLRLSCAASGFIFAWYDMGWVRQAPGKGLEWVSSINDGGNVSYYADSVKGRFTISRDNSKNTLYLQMNSLRAEDTAVYYCATAEDEPGYDYWGQGTLVTVSS

SEQ ID NO: 2336 - protein, 118 aa, Homo sapiens
GVQLLESGGGLVQPGGSLRLSCAASGFIFAWYDMGWVRQAPGKGLEWVSSINDGGNVEYYADSVKGRFTISRDNSKNTLYLQMNSLRAEDTAVYYCATAEDEPGYDYWGQGTLVTVSS

SEQ ID NO: 2337 - protein, 118 aa, Homo sapiens
GVQLLESGGGLVQPGGSLRLSCAASGFIFAWYDMGWVRQAPGKGLEWVSSINDGGNVFYYADSVKGRFTISRDNSKNTLYLQMNSLRAEDTAVYYCATAEDEPGYDYWGQGTLVTVSS

SEQ ID NO: 2338 - protein, 118 aa, Homo sapiens
GVQLLESGGGLVQPGGSLRLSCAASGFIFAWYDMGWVRQAPGKGLEWVSSINDGGNVLYYADSVKGRFTISRDNSKNTLYLQMNSLRAEDTAVYYCATAEDEPGYDYWGQGTLVTVSS

SEQ ID NO: 2339 - protein, 118 aa, Homo sapiens
GVQLLESGGGLVQPGGSLRLSCAASGFIFAWYDMGWVRQAPGKGLEWVSSINDGGNVPYYADSVKGRFTISRDNSKNTLYLQMNSLRAEDTAVYYCATAEDEPGYDYWGQGTLVTVSS

SEQ ID NO: 2340 - protein, 118 aa, Homo sapiens
GVQLLESGGGLVQPGGSLRLSCAASGFIFAWYDMGWARQAPGKGLEWVSSIDWKGGKTYYADSVKGRFTISADNSKNTLYLQMNSLRAEDTAVYYCATAEDEPGYDYWGQGTLVTVSS

SEQ ID NO: 2341 - protein, 118 aa, Homo sapiens
GVQLLESGGGLVQPGGSLRLSCAASGFIFAWYDMGWARQAPGKGLEWVSSIDWKGGKTYYADSVKGRFTISKDNSKNTLYLQMNSLRAEDTAVYYCATAEDEPGYDYWGQGTLVTVSS

SEQ ID NO: 2342 - protein, 120 aa, Homo sapiens
GVQLLESGGGLVQPGGSLRLSCAASGFIFAWYDMGWARQAPGKGLEWVSSIDWKTKGGKTYYADSVKGRFTISRDNSKNTLYLQMNSLRAEDTAVYYCATAEDEPGYDYWGQGTLVTVSS

SEQ ID NO: 2343 - protein, 120 aa, Homo sapiens
GVQLLESGGGLVQPGGSLRLSCAASGFIFAWYDMGWARQAPGKGLEWVSSIDWKAKGGKTYYADSVKGRFTISRDNSKNTLYLQMNSLRAEDTAVYYCATAEDEPGYDYWGQGTLVTVSS

SEQ ID NO: 2344 - protein, 118 aa, Homo sapiens
EVQLLESGGGLVQPGGSLRLSCAASGFIFAWYDMGWARQAPGKGLEWVSSIDWKGGKTYYADSVKGRFTISRDNSKNTLYLQMNSLRDEDTAVYYCATAEDEPGYDYWGQGTLVTVSS

SEQ ID NO: 2345 - protein, 118 aa, Homo sapiens
GVQLLESGGGLVQPGGSLRLSCAASGFIFAWYDMKWARQAPGKGLEWVSSIDWHGEVTYYADSVKGRFTISRDNSKNTLYLQMNSLRAEDTAVYYCATAEDEPGYDYWGQGTLVTVSS

SEQ ID NO: 2346 - protein, 118 aa, Homo sapiens
GVQLLESGGGLVQPGGSLRLSCAASGFIFAWYDMMWVRQAPGKGLEWVSSIDWHGEVTYYADSVKGRFTISRDNSKNTLYLQMNSLRAEDTAVYYCATAEDEPGYDYWGQGTLVTVSS

SEQ ID NO: 2347 - protein, 118 aa, Homo sapiens
GVQLLESGGGLVQPGGSLRLSCAASGFIFAWYDMGWVRQAPGKGLEWVSSINDGGNVAYYADSVKGRFTISRDNSKNTLYLQMNSLRAEDTAVYYCATAEDEPGYDYWGQGTLVTVSS

SEQ ID NO: 2348 - protein, 119 aa, Homo sapiens
GVQLLESGGGLVQPGGSLRLSCAASGFIFAWAYDMGWARQAPGKGLEWVSSIDWKGGKTYYADSVKGRFTISRDNSKNTLYLQMNSLRAEDTAVYYCATAEDEPGYDYWGQGTLVTVSS

SEQ ID NO: 2349 - protein, 119 aa, Homo sapiens
GVQLLESGGGLVQPGGSLRLSCAASGFIFAWSYDMGWARQAPGKGLEWVSSIDWKGGKTYYADSVKGRFTISRDNSKNTLYLQMNSLRAEDTAVYYCATAEDEPGYDYWGQGTLVTVSS

SEQ ID NO: 2350 - protein, 118 aa, Homo sapiens
GVQLLESGGGLVQPGGSLRLSCAVSGFIFAWYDMGWARQAPGKGLEWVSSIDWKGGKTYYADSVKGRFTISRDNSKNTLYLQMNSLRAEDTAVYYCATAEDEPGYDYWGQGTLVTVSS

SEQ ID NO: 2351 - protein, 118 aa, Homo sapiens
GVQLLESGGGLVQPGGSLRLSCAASGFIFAWYDMKWARQAPGKGLEWVSSIDWHGEVTYYADSVKGRFTISRDNSKNTLYLQMNSLRDEDTAVYYCATAEDEPGYDYWGQGTLVTVSS

SEQ ID NO: 2352 - protein, 118 aa, Homo sapiens
EVQLLESGGGLVQPGGSLRLSCAASGFTFDREEMDWVRQAPGKGLEWVSSIDWKGGKTYYADSVKGRFTISRDNSKNTLYLQMNSLRAEDTAVYYCATAEDEPGYDYWGQGTLVTVSS

SEQ ID NO: 2353 - protein, 118 aa, Homo sapiens
GVQLLESGGGLVQPGGSLRLSCAASGFIFAWYDMKWVRQAPGKGLEWVSSIDWHGEVTYYADSVKGRFTISRDNSKNTLYLQMNSLRDEDTAVYYCATAEDEPGYDYWGQGTLVTVSS

SEQ ID NO: 2354 - protein, 118 aa, Homo sapiens
GVQLLESGGGLVQPGGSLRLSCAASGYSFAWYDMGWVRQAPGKGLEWVSSIDWKGGKTYYADSVKGRFTISRDNSKNTLYLQMNSLRAEDTAVYYCATAEDEPGYDYWGQGTLVTVSS

SEQ ID NO: 2355 - protein, 118 aa, Homo sapiens
GVQLLESGGGLVQPGGSLRLSCAASGFTFGAYDMGWVRQAPGKGLEWVSSIDWKGGKTYYADSVKGRFTISRDNSKNTLYLQMNSLRAEDTAVYYCATAEDEPGYDYWGQGTLVTVSS

SEQ ID NO: 2356 - protein, 118 aa, Homo sapiens
GVQLLESGGGLVQPGGSLRLSCAASGFTFPFYDMGWVRQAPGKGLEWVSSIDWKGGKTYYADSVKGRFTISRDNSKNTLYLQMNSLRAEDTAVYYCATAEDEPGYDYWGQGTLVTVSS

SEQ ID NO: 2357 - protein, 118 aa, Homo sapiens
GVQLLESGGGLVQPGGSLRLSCAASGFVFATYDMGWVRQAPGKGLEWVSSIDWKGGKTYYADSVKGRFTISRDNSKNTLYLQMNSLRAEDTAVYYCATAEDEPGYDYWGQGTLVTVSS

SEQ ID NO: 2358 - protein, 118 aa, Homo sapiens
GVQLLESGGGLVQPGGSLRLSCAASGFSFSVYDMGWVRQAPGKGLEWVSSIDWKGGKTYYADSVKGRFTISRDNSKNTLYLQMNSLRAEDTAVYYCATAEDEPGYDYWGQGTLVTVSS

SEQ ID NO: 2359 - protein, 118 aa, Homo sapiens
GVQLLESGGGLVQPGGSLRLSCAASGLMLSAYDMGWVRQAPGKGLEWVSSIDWKGGKTYYADSVKGRFTISRDNSKNTLYLQMNSLRAEDTAVYYCATAEDEPGYDYWGQGTLVTVSS

SEQ ID NO: 2360 - protein, 118 aa, Homo sapiens
GVQLLESGGGLVQPGGSLRLSCAASGFLFTTYDMGWVRQAPGKGLEWVSSIDWKGGKTYYADSVKGRFTISRDNSKNTLYLQMNSLRAEDTAVYYCATAEDEPGYDYWGQGTLVTVSS

SEQ ID NO: 2361 - protein, 118 aa, Homo sapiens
GVQLLESGGGLVQPGGSLRLSCAASGFTFAWYDMGWVRQAPGKGLEWVSSIDWKGGKTYYADSVKGRFTISRDNSKNTLYLQMNSLRAEDTAVYYCATAEDEPGYDYWGQGTLVTVSS

SEQ ID NO: 2362 - protein, 118 aa, Homo sapiens
GVQLLESGGGLVQPGGSLRLSCAASGFSFAWYDMGWVRQAPGKGLEWVSSIDWKGGKTYYADSVKGRFTISRDNSKNTLYLQMNSLRAEDTAVYYCATAEDEPGYDYWGQGTLVTVSS

SEQ ID NO: 2363 - protein, 118 aa, Homo sapiens
GVQLLESGGGLVQPGGSLRLSCAASGFMFSGYDMGWVRQAPGKGLEWVSSIDWKGGKTYYADSVKGRFTISRDNSKNTLYLQMNSLRAEDTAVYYCATAEDEPGYDYWGQGTLVTVSS

SEQ ID NO: 2364 - protein, 118 aa, Homo sapiens
GVQLLESGGGLVQPGGSLRLSCAASGFFFPWYDMGWVRQAPGKGLEWVSSIDWKGGKTYYADSVKGRFTISRDNSKNTLYLQMNSLRAEDTAVYYCATAEDEPGYDYWGQGTLVTVSS

SEQ ID NO: 2365 - protein, 118 aa, Homo sapiens
GVQLLESGGGLVQPGGSLRLSCAASGFSFLWYDMGWVRQAPGKGLEWVSSIDWKGGKTYYADSVKGRFTISRDNSKNTLYLQMNSLRAEDTAVYYCATAEDEPGYDYWGQGTLVTVSS

SEQ ID NO: 2366 - protein, 118 aa, Homo sapiens
GVQLLESGGGLVQPGGSLRLSCAASGFIFAVYDMGWVRQAPGKGLEWVSSIDWHGKITYYADSVKGRFTISRDNSKNTLYLQMNSLRAEDTAVYYCATAEDEPGYDYWGQGTLVTVSS

SEQ ID NO: 2367 - protein, 118 aa, Homo sapiens
GVQLLESGGGLVQPGGSLRLSCAASGFIFAWYDMKWVRQAPGKGLEWVSSIDWHGKITYYADSVKGRFTISRDNSKNTLYLQMNSLRAEDTAVYYCATAEDEPGYDYWGQGTLVTVSS

SEQ ID NO: 2368 - protein, 118 aa, Homo sapiens
GVQLLESGGGLVQPGGSLRLSCAASGFTFAWYDMGWVRQAPGKGLEWVSSIDWHGKITYYADSVKGRFTISRDNSKNTLYLQMNSLRAEDTAVYYCATAEDEPGYDYWGQGTLVTVSS

SEQ ID NO: 2369 - protein, 118 aa, Homo sapiens
GVQLLESGGGLVQPGGSLRLSCAASGFTFAWYDMGWVRQAPGKGLEWVSSIDWHGEVTYYADSVKGRFTISRDNSKNTLYLQMNSLRAEDTAVYYCATAEDEPGYDYWGQGTLVTVSS

SEQ ID NO: 2370 - protein, 118 aa, Homo sapiens
GVQLLESGGGLVQPGGSLRLSCAASGFIFGWYDMGWVRQAPGKGLEWVSSIDWKGGKTYYADSVKGRFTISRDNSKNTLYLQMNSLRAEDTAVYYCATAEDEPGYDYWGQGTLVTVSS

SEQ ID NO: 2371 - protein, 118 aa, Homo sapiens; identical to SEQ ID NO: 2370

SEQ ID NO: 2372 - protein, 118 aa, Homo sapiens
GVQLLESGGGLVQPGGSLRLSCAASGFNFAWYDMGWVRQAPGKGLEWVSSIDWKGGKTYYADSVKGRFTISRDNSKNTLYLQMNSLRAEDTAVYYCATAEDEPGYDYWGQGTLVTVSS

SEQ ID NO: 2373 - protein, 118 aa, Homo sapiens
GVQLLESGGGLVQPGGSLRLSCAASGFMFSWYDMGWVRQAPGKGLEWVSSIDWKGGKTYYADSVKGRFTISRDNSKNTLYLQMNSLRAEDTAVYYCATAEDEPGYDYWGQGTLVTVSS

SEQ ID NO: 2374 - protein, 118 aa, Homo sapiens
GVQLLESGGGLVQPGGSLRLSCAASGFVFPWYDMGWVRQAPGKGLEWVSSIDWKGGKTYYADSVKGRFTISRDNSKNTLYLQMNSLRAEDTAVYYCATAEDEPGYDYWGQGTLVTVSS

SEQ ID NO: 2375 - protein, 118 aa, Homo sapiens
GVQLLESGGGLVQPGGSLRLSCAASGFIFRWYDMGWVRQAPGKGLEWVSSIDWKGGKTYYADSVKGRFTISRDNSKNTLYLQMNSLRAEDTAVYYCATAEDEPGYDYWGQGTLVTVSS

SEQ ID NO: 2376 - protein, 118 aa, Homo sapiens
GVQLLESGGGLVQPGGSLRLSCAASGFLFFWYDMGWVRQAPGKGLEWVSSIDWKGGKTYYADSVKGRFTISRDNSKNTLYLQMNSLRAEDTAVYYCATAEDEPGYDYWGQGTLVTVSS

SEQ ID NO: 2377 - protein, 118 aa, Homo sapiens
GVQLLESGGGLVQPGGSLRLSCAASGFIFAWYDMGWARQAPGKGLEWVSIIACKGGKTYYADSVKGRFTISRDNSKNTLYLQMNSLRAEDTAVYYCATAEDEPGYDYWGQGTLVTVSS

SEQ ID NO: 2378 - protein, 118 aa, Homo sapiens
GVQLLESGGGLVQPGGSLRLSCAASGFIFAWYDMGWARQAPGKGLEWVSKIGDKGGKTYYADSVKGRFTISRDNSKNTLYLQMNSLRAEDTAVYYCATAEDEPGYDYWGQGTLVTVSS

SEQ ID NO: 2379 - protein, 118 aa, Homo sapiens
GVQLLESGGGLVQPGGSLRLSCAASGFVFSWYDMGWVRQAPGKGLEWVSSIDLAGRKTYYADSVKGRFTISRDNSKNTLYLQMNSLRAEDTAVYYCATAEDEPGYDYWGQGTLVTVSS

SEQ ID NO: 2380 - protein, 118 aa, Homo sapiens
GVQLLESGGGLVQPGGSLRLSCAASGFWYDVYDMGWVRQAPGKGLEWVSSIDWKGGKTYYADSVKGRFTISRDNSKNTLYLQMNSLRAEDTAVYYCATAEDEPGYDYWGQGTLVTVSS

SEQ ID NO: 2381 - protein, 118 aa, Homo sapiens
GVQLLESGGGLVQPGGSLRLSCAASGFVFAWYDMGWVRQAPGKGLEWVSSIDWKGGKTYYADSVKGRFTISRDNSKNTLYLQMNSLRAEDTAVYYCATAEDEPGYDYWGQGTLVTVSS

SEQ ID NO: 2382 - protein, 118 aa, Homo sapiens
GVQLLESGGGLVQPGGSLRLSCAASGFLFSTYDMGWVRQAPGKGLEWVSSIDWKGGKTYYADSVKGRFTISRDNSKNTLYLQMNSLRAEDTAVYYCATAEDEPGYDYWGQGTLVTVSS

SEQ ID NO: 2383 - protein, 118 aa, Homo sapiens
GVQLLESGGGLVQPGGSLRLSCAASGLLFAAYDMGWVRQAPGKGLEWVSSIDWKGGKTYYADSVKGRFTISRDNSKNTLYLQMNSLRAEDTAVYYCATAEDEPGYDYWGQGTLVTVSS

SEQ ID NO: 2384 - protein, 118 aa, Homo sapiens
GVQLLESGGGLVQPGGSLRLSCAASGFVFDVYDMGWARQAPGKGLEWVSSIDWKGGKTYYADSVKGRFTISRDNSKNTLYLQMNSLRAEDTAVYYCATAEDEPGYDYWGQGTLVTVSS

SEQ ID NO: 2385 - protein, 118 aa, Homo sapiens
GVQLLESGGGLVQPGGSLRLSCAASGFIFAWYDMGWVRQAPGKGLEWVSSIDWKGGKTYYADSVKGRFTISRDNSKNTLYLQMNSLRAEDTAVYYCATADDEPGYDYWGQGTLVTVSS

SEQ ID NO: 2386 - protein, 118 aa, Homo sapiens
GVQLLESGGGLVQPGGSLRLSCAASGFIFAWYDMGWARQAPGKGLEWVSSIDWKGNKTYYADSVKGRFTISRDNSKNTLYLQMNSLRAEDTAVYYCATAEDEPGYDYWGQGTLVTVSS

SEQ ID NO: 2387 - protein, 118 aa, Homo sapiens
GVQLLESGGGLVQPGGSLRLSCAASGFIFATYDMRWVRQAPGKGLEWVSSIDWKGGKTYYADSVKGRFTISRDNSKNTLYLQMNSLRAEDTAVYYCATAEDEPGYDYWGQGTLVTVSS

SEQ ID NO: 2388 - protein, 118 aa, Homo sapiens
GVQLLESGGGLVQPGGSLRLSCAASGFTMNWYDMGWVRQAPGKGLEWVSSIDWKGGKTYYADSVKGRFTISRDNSKNTLYLQMNSLRAEDTAVYYCATAEDEPGYDYWGQGTLVTVSS

SEQ ID NO: 2389 - protein, 118 aa, Homo sapiens
GVQLLESGGGLVQPGGSLRLSCAASGFIFHTYDMGWVRQAPGKGLEWVSSIDWKGGKTYYADSVKGRFTISRDNSKNTLYLQMNSLRAEDTAVYYCATAEDEPGYDYWGQGTLVTVSS

SEQ ID NO: 2390 - protein, 118 aa, Homo sapiens
GVQLLESGGGLVQPGGSLRLSCAASGFLFWVYDMGWVRQAPGKGLEWVSSIDSIGAKTYYADSVKGRFTISRDNSKNTLYLQMNSLRAEDTAVYYCATAEDEPGYDYWGQGTLVTVSS

SEQ ID NO: 2391 - protein, 118 aa, Homo sapiens
GVQLLESGGGLVQPGGSLRLSCAASGFIFAWYDMGWARQAPGKGLEWVSTIDNKGGKTYYADSVKGRFTISRDNSKNTLYLQMNSLRAEDTAVYYCATAEDEPGYDYWGQGTLVTVSS

SEQ ID NO: 2392 - protein, 118 aa, Homo sapiens; identical to SEQ ID NO: 2362

SEQ ID NO: 2393 - DNA, 324 bp, Homo sapiens
gacatccagatgacccagtcaccatcctccctatctgcatctgtaggagaccgtgtcaccatcacttgccgggcaagtcgccacattagcgactggttacattggtatcagcagaaaccagggaaagcccccaagctcctgatcccgtgggcctccgggttgtggagtggggtcccatcacgtttcagtggcagtgggtctgggacagatttcactctcaccatcagcagtctgcaacccgaagattttgctacgtactactgtttgcaggaggggtggggtcctccgacgttcggccaagggaccaaggtggaaatcaaacgg

SEQ ID NO: 2394 - DNA, 324 bp, Homo sapiens
gacatccagatgacccagtcaccatcctccctgtctgcatctgtaggagaccgtgtcaccatcacttgccgggcaagtcgccacattggcgactggttacattggtatcagcagaaaccagggaaagcccccaagctcctgatcgcctgggcgtccacgttggacagtggggtcccatcacgtttcagtggcagtgggtctgggacagatttcactctcaccatcagcagtctgcaacccgaagattttgctacgtactactgtttgcaggaggggtggggtcctccgacgttcggccaagggaccaaggtggaaatcaaacgg

SEQ ID NO: 2395 - DNA, 348 bp, Homo sapiens
gaggtgcagctgttggactctgggggaggcttggtacagcctggggggtccctgcgtctctcctgtgcagcctccggattcacctttcgtaatttcgggatggggtgggtccgccaggctccagggaagggtctagagtgggtctcatggattgatgcgtctggtactgagacatactacgcagaccctgtgaagggccggttcaccatctcccgcgacaattccaagaacacgctgtatctgcaaatgaacagcctgcgtgccgaggacaccgcggtatattactgtgcgaaaagtctggggcgttttgactactggggtcagggaaccctggtcaccgtcccgagt

SEQ ID NO: 2396 - DNA, 348 bp, Homo sapiens
gaggtgcagctgttggactctgggggaggcttggtacagcctggggggtccctgcgtctctcctgtgcagcctccggattcacctttcgtaatttcgggatggggtgggtccgccaggctccagggaagggtctagagtgggtctcatggattctggggtctggtactgagacatactacgcagaccctgtgaagggccggttcaccatctcccgcgacaattccaggaacacgctgtatctgcaaatgaacagcctgcgtgccgaggacaccgcggtatattactgtgcgaaaagtctggggcgttttgactactggggtcagggaaccctggtcaccgtctcgagc

SEQ ID NO: 2397 - DNA, 348 bp, Homo sapiens
gaggtgcagctgttggactctgggggaggcttggtacagcctggggggtccctgcgtctctcctgtgcagcctccggattcacctttcgtaatttcgggatggggtgggtccgccaggctccagggaagggtctagagtgggtctcatggattgtggggtcgggtactgagacatactacgcagaccctgtgaagggccggttcaccatctcccgcgacaattccaagaacacgctgtatctgcaaatgaacagcctgcgtgccgaggacaccgcggtatattactgtgcgaaaagtctggggcgttttgactactggggtcagggaaccctggtcaccgtctcgagc

SEQ ID NO: 2398 - DNA, 348 bp, Homo sapiens
gaggtgcagctgttggactctgggggaggcttggtacagcctggggggtccctgcgtctctcctgtgcagcctccggattcacctttcgtaatttcgggatggggtgggtccgccaggctccagggaagggtctagagtgggtctcatggattgagggggggggtactgagacatactacgcagaccctgtgaagggccggttcaccatctcccgcgacaattccaagaacacgctgtatctgcaaatgaacagcctgcgtgccgaggacaccgcggtatattactgtgcgaaaagtctggggcgttttgactactggggtcagggaaccctggtcaccgtctcgagc

SEQ ID NO: 2399 - DNA, 348 bp, Homo sapiens
gaggtgcagctgttggactctgggggaggcttggtacagcctggggggtccctgcgtctctcctgtgcagcctccggattcacctttcgtaatttcgggatggggtgggtccgccaggctccagggaagggtctagagtgggtctcatggattatctcctctggtactgagacatactacgcagaccctgtgaagggccggttcaccatctcccgcgacaattccaagaacacgctgtatctgcaaatgaacagcctgcgtgccgaggacaccgcggtatattactgtgcgaaaagtctggggcgttttgactactggggtcagggaaccctggtcaccgtctcgggc

SEQ ID NO: 2400 - DNA, 348 bp, Homo sapiens
gaggtgcagctgttggagtctgggggaggcttggtacagcctggggggtccctgcgtctctcctgtgcagcctccggattcacctttcgtaatttcgggatggggtgggtccgccaggctccagggaagggtctagagtgggtctcatggattctggggtctggtactgagacatactacgcagactccgtgaagggccggttcaccatctcccgcgacaattccaagaacacgctgtatctgcaaatgaacagcctgcgtgccgaggacaccgcggtatattactgtgcgaaaagtctggggcgttttgactactggggtcagggaaccctggtcaccgtctcgagc

SEQ ID NO: 2401 - DNA, 348 bp, Homo sapiens
gaggtgcagctgttggagtctgggggaggcttggtacagcctggggggtccctgcgtctctcctgtgcagcctccggattcacctttcgtaatttcgggatggggtgggtccgccaggctccagggaagggtctagagtgggtctcatggattatctcctctggtactgagacatactacgcagactccgtgaagggccggttcaccatctcccgcgacaattccaagaacacgctgtatctgcaaatgaacagcctgcgtgccgaggacaccgcggtatattactgtgcgaaaagtctggggcgttttgactactggggtcagggaaccctggtcaccgtctcgagc

SEQ ID NO: 2402 - DNA, 348 bp, Homo sapiens
gaggtgcagctgttggagtctgggggaggcttggtacagcctggagggtccctgcgtctctcctgtgcagcctccggattcacctttcgtaattatgggatggcgtgggtccgccaggctccagggaagggtctagagtgggtctcatggattgagggggggggtactgagacatactacgcagaccctgtgaagggccggttcaccatctcccgcgacaattccaagaacacgctgtatctgcaaatgaacagcctgcgtgccgaggacaccgcggtatattactgtgcgaaaagtctggggcgttttgactactggggtcagggaaccctggtcaccgtctcgagc

SEQ ID NO: 2403 - DNA, 348 bp, Homo sapiens
gaggtgcagctgttggagtctgggggaggcttggtacagcctggggggtccctgcgtctctcctgtgcagcctccggattcacctttcgtaatttcgggatggggtgggtccgccaggctccagggaagggtctagagtgggtctcatggattgatgcgtctggtactgagacatactacgcagaccctgtgaagggccggttcaccatctcccgcgacaattccaagaacacgctgtatctgcaaatgaacagcctgcgtgccgaggacaccgcggtatattactgtgcgaaaagtctggggcgttttgactactggggtcagggaaccctggtcaccgtctcgagc

SEQ ID NO: 2404 - DNA, 348 bp, Homo sapiens
gaggtgcagctgttggagtctgggggaggcttggtacagcctggggggtccctgcgtctctcctgtgcagcctccggattcacctttcgtaatttcgggatggggtgggtccgccaggctccagggaagggtctagagtgggtctcatggattctggggtctggtactgaggaatactacgcagactccgtgaagggccggttcaccatctcccgcgacaattccaagaacacgctgtatctgcaaatgaacagcctgcgtgccgaggacaccgcggtatattactgtgcgaaaagtctggggcgttttgactactggggtcagggaaccctggtcaccgtctcgagc

SEQ ID NO: 2405 - DNA, 348 bp, Homo sapiens
gaggtgcagctgttggagtctgggggaggcttggtacagcctggggggtccctgcgtctctcctgtgcagcctccggattcacctttcgtaatttcgggatggggtgggtccgccaggctccagggaagggtctagagtgggtctcatggattctggggtctggtactgaggaatactacgcagactccgtgaagggccggttcaccatctcccgcgacaattccaggaacacgctgtatctgcaaatgaacagcctgcgtgccgaggacaccgcggtatattactgtgcgaaaagtctggggcgttttgactactggggtcagggaaccctggtcaccgtctcgagc

SEQ ID NO: 2406 - DNA, 348 bp, Homo sapiens
gaggtgcagctgttggagtctgggggaggcttggtacagcctggggggtccctgcgtctctcctgtgcagcctccggattcacctttcgtaatttcgggatggggtgggtccgccaggctccagggaagggtctagagtgggtctcatggattgtggggtcgggtactgaggaatactacgcagactccgtgaagggccggttcaccatctcccgcgacaattccaagaacacgctgtatctgcaaatgaacagcctgcgtgccgaggacaccgcggtatattactgtgcgaaaagtctggggcgttttgactactggggtcagggaaccctggtcaccgtctcgagc

SEQ ID NO: 2407 - DNA, 348 bp, Homo sapiens
gaggtgcagctgttggagtctgggggaggcttggtacagcctggggggtccctgcgtctctcctgtgcagcctccggattcacctttcgtaatttcgggatggggtgggtccgccaggctccagggaagggtctagagtgggtctcatggattgagggggggggtactgaggaatactacgcagactccgtgaagggccggttcaccatctcccgcgacaattccaagaacacgctgtatctgcaaatgaacagcctgcgtgccgaggacaccgcggtatattactgtgcgaaaagtctggggcgttttgactactggggtcagggaaccctggtcaccgtctcgagc

SEQ ID NO: 2408 - DNA, 348 bp, Homo sapiens
gaggtgcagctgttggagtctgggggaggcttggtacagcctggggggtccctgcgtctctcctgtgcagcctccggattcacctttcgtaatttcgggatggggtgggtccgccaggctccagggaagggtctagagtgggtctcatggattatctcctctggtactgaggaatactacgcagactccgtgaagggccggttcaccatctcccgcgacaattccaagaacacgctgtatctgcaaatgaacagcctgcgtgccgaggacaccgcggtatattactgtgcgaaaagtctggggcgttttgactactggggtcagggaaccctggtcaccgtctcgagc

SEQ ID NO: 2409 - DNA, 348 bp, Homo sapiens
gaggtgcagctgttggagtctgggggaggcttggtacagcctggggggtccctgcgtctctcctgtgcagcctccggattcacctttcgtaatttcgggatggggtgggtccgccaggctccagggaagggtctagagtgggtctcatggattgagggggggggtactgagacatactacgcagactccgtgaagggccggttcaccatctcccgcgacaattccaagaacacgctgtatctgcaaatggcgagcctgcgtgccgaggacaccgcggtatattactgtgcgaaaagtctggggcgttttgactactggggtcagggaaccctggtcaccgtctcgagc

SEQ ID NO: 2410 - DNA, 348 bp, Homo sapiens
gaggtgcagctgttggagtctgggggaggcttggtacagcctggggggtccctgcgtctctcctgtgcagcctccggattcacctttcgtaatttcgggatggggtgggtccgccaggctccagggaagggtctagagtgggtctcatggattctggggtctggtactgagacatactacgcagactccgtgaagggccggttcaccatctcccgcgacaattccaagaacacgctgtatctgcaaatggcgagcctgcgtgccgaggacaccgcggtatattactgtgcgaaaagtctggggcgttttgactactggggtcagggaaccctggtcaccgtctcgagc

SEQ ID NO: 2411 - DNA, 348 bp, Homo sapiens
gaggtgcagctgttggagtctgggggaggcttggtacagcctggggggtccctgcgtctctcctgtgcagcctccggattcacctttcgtaatttcgggatggggtgggtccgccaggctccagggaagggtctagagtgggtctcatggattatctcctctggtactgagacatactacgcagactccgtgaagggccggttcaccatctcccgcgacaattccaagaacacgctgtatctgcaaatggcgagcctgcgtgccgaggacaccgcggtatattactgtgcgaaaagtctggggcgttttgactactggggtcagggaaccctggtcaccgtctcgagc

SEQ ID NO: 2412 - DNA, 348 bp, Homo sapiens
gaggtgcagctgttggagtctgggggaggcttggtacagcctggggggtccctgcgtctctcctgtgcagcctccggattcacctttcgtaatttcgggatggggtgggtccgccaggctccagggaagggtctagagtgggtctcatggattatctcctctggtactgagacatactacgcagactccgtgaagggccggttcaccatctcccgcgacaattccaagaacacgctgtatctgcaaatgaacagcctgcgtgccgaggacaccgcggtatattactgtgcgaaaagttatggtgcttttgactactggggtcagggaaccctggtcaccgtctcgagc

SEQ ID NO: 2413 - DNA, 348 bp, Homo sapiens
gaggtgcagctgttggagtctgggggaggcttggtacagcctggggggtccctgcgtctctcctgtgcagcctccggattcacctttcgtaatttcgggatggggtgggtccgccaggctccagggaagggtctagagtgggtctcatggattatctcctctggtactgagacatactacgcagactccgtgaagggccggttcaccatctcccgcgacaattccaagaacacgctgtatctgcaaatgaacagcctgcgtgatgaggacaccgcggtatattactgtgcgaaaagtctggggcgttttgactactggggtcagggaaccctggtcaccgtctctagc

SEQ ID NO: 2414 - DNA, 348 bp, Homo sapiens
gaggtgcagctggtggagtctgggggaggcttggtacagcctggggggtccctgcgtctctcctgtgcagcctccggattcacctttcgtaatttcgggatggggtgggtccgccaggctccagggaagggtctagagtgggtctcatggattatctcctctggtactgagacatactacgcagactccgtgaagggccggttcaccatctcccgcgacaattccaagaacacgctgtatctgcaaatgacgagcctgcgtgccgaggacaccgcggtatattactgtgcgaaaagtctggggcgttttgactactggggtcagggaaccctggtcaccgtctctagc

SEQ ID NO: 2415 - DNA, 347 bp, Homo sapiens
gaagttcaattattagaaagcggtggtggtctggttcaaccgggtggtagcctgcgcctgagctgcgcggcgagcggttttactttccgcaacttcggcatgggtgggctcgtcaagcgccgggtaaaggcctggaatgggttagctggatcatctcttccggcaccgaaacatattatgcggatagcgttaaaggtcgttttactattagccgtgataacagcaaaaataccctgtacctgcaaatgaatagcctgcgcgcggaagatactgctgtttactattgcgctaagagcctgggtcgtttcgattattggggtcaaggtactctggttactgttagctct

SEQ ID NO: 2416 - DNA, 348 bp, Homo sapiens
gaagttcaattattagaaagcggtggtggtctggttcaaccgggtggtagcctgcgcctgagctgcgcggcgagcggttttactttccgcaacttcggcatgggttgggctcgtcaagcgccgggtaaaccgctggaatgggttagctggatcatctcttccggcaccgaaacatattatgcggatagcgttaaaggtcgttttactattagccgtgataacagcaaaaataccctgtacctgcaaatgaatagcctgcgcgcggaagatactgctgtttactattgcgctaagagcctgggtcgtttcgattattggggtcaaggtactctggttactgttagctct

SEQ ID NO: 2417 - DNA, 348 bp, Homo sapiens
gaagttcaattattagaaagcggtggtggtctggttcaaccgggtggtagcctgcgcctgagctgcgcggcgagcggttttactttccgcaacttcggcatgggttgggttcgtcaagcgccgggtaaagagctggaatgggttagctggatcatctcttccggcaccgaaacatattatgcggatagcgttaaaggtcgttttactattagccgtgataacagcaaaaataccctgtacctgcaaatgaatagcctgcgcgcggaagatactgctgtttactattgcgctaagagcctgggtcgtttcgattattggggtcaaggtactctggttactgttagctct

SEQ ID NO: 2418 - DNA, 348 bp, Homo sapiens
gaagttcaattattagaaagcggtggtggtctggttcaaccgggtggtagcctgcgcctgagctgcgcggcgagcggttttactttccgcaacttcggcatgggttgggttcgtcaagcgccgggtaaaggcctggaactcgttagctggatcatctcttccggcaccgaaacatattatgcggatagcgttaaaggtcgttttactattagccgtgataacagcaaaaataccctgtacctgcaaatgaatagcctgcgcgcggaagatactgctgtttactattgcgctaagagcctgggtcgtttcgattattggggtcaaggtactctggttactgttagctct

SEQ ID NO: 2419 - DNA, 348 bp, Homo sapiens
gaagttcaattattagaaagcggtggtggtctggttcaaccgggtggtagcctgcgcctgagctgcgcggcgagcggttttactttccgcaacttcggcatgggttgggctcgtcaagcgccgggtaaaggcctggaatgggttagctggatcatctcttccggcaccgaaacatattatgcggatagcgttaaaggtcgttttactattagccgtgataacagcaaaaataccctgtacctgcaaatgaatagcctgcgcgcggaagatactgctgtttactattgcgctaagagcctgggtcgtttcgattatttcggtcaaggtactctggttactgttagctct

SEQ ID NO: 2420 - DNA, 348 bp, Homo sapiens
gaagttcaattattagaaagcggtggtggtctggttcaaccgggtggtagcctgcgcctgagctgcgcggcgagcggttttactttccgcaacttcggcatgggttgggttcgtcaagcgccgggtaaaggcctggaatgggttagctggatcatctcttccggcaccgaaacatattatgcggatagcgttaaaggtcgttttactattagccgtgataacagcaaaaataccctgtacctgcaaatgaatagcctgcgcgcggaagatactgctgtttactattgcgctaagagcctgggtcgtttcgattattacggtcaaggtactctggttactgttagctct

SEQ ID NO: 2421 - DNA, 348 bp, Homo sapiens
gaagttcaattattagaaagcggtggtggtctggttcaaccgggtggtagcctgcgcctgagctgcgcggcgagcggttttactttccgcaacttcggcatgggttgggttcgtcaagcgccgggtaaaggcctggaatgggttagctggatcatctcttccggcaccgaaacatattatgcggatagcgttaaaggtcgttttactattagccgtgataacagcaaaaataccctgtacctgcaaatgaatagcctgcgcgcggaagatactgctgtttactattgcgctaagagcctgggtcgtttcgattatggtggtcaaggtactctggttactgttagctct

SEQ ID NO: 2422 - DNA, 348 bp, Homo sapiens
gaagttcaattattagaaagcggtggtggtctggttcaaccgggtggtagcctgcgcctgagctgcgcggcgagcggttttactttccgcaacttcggcatgggttgggttcgtcaagcgccgggtaaaggcctggaatgggttagctggatcatctcttccggcaccgaaacatattatgcggatagcgttaaaggtcgttttactattagccgtgataacagcaaaaataccctgtacctgcaaatgaatagcctgcgcgcggaagatactgctgtttactattgcgctaagagcctgggtcgtttcgattattggggtcaaggtactcaggttactgttagctct

SEQ ID NO: 2423 - DNA, 357 bp, Homo sapiens
gaggtgcagctgttggagtctgggggaggcttggtacagcctggggggtccctgcgtctctcctgtgcagcctccggattcacctttcgtaatttcgggatggggtgggtccgccaggctccagggaagggtctagagtgggtctcatggattgagggggggggtactgagacatactacgcagactccgtgaagggccggttcaccatctcccgcgacaattccaagaacacgctgtatctgcaaatgaacagcctgcgtgccgaggacaccgcggtatattactgtgcgcgcctacctaagagggggccttggtttgactaccggggtcagggaaccctggtcaccgtctcgagc

SEQ ID NO: 2424 - DNA, 348 bp, Homo sapiens
gaagttcaattattagaaagcggtggtggtctggttcaaccgggtggtagcctgcgcctgagctgcgcggcgagcggttttactttccgcaacttcggcatgggttgggttcgtcaagcgccgggtaaaccgctggaatgggttagctggatcatctcttccggcaccgaaacatattatgcggatagcgttaaaggtcgttttactattagccgtgataacagcaaaaataccctgtacctgcaaatgaatagcctgcgcgcggaagatactgctgtttactattgcgctaagagcctgggtcgtttcgattattggggtcaaggtactctggttactgttagctct

SEQ ID NO: 2425 - DNA, 348 bp, Homo sapiens
gaagttcaattattagaaagcggtggtggtctggttcaaccgggtggtagcctgcgcctgagctgcgcggcgagcggttttactttccgcaacttcggcatgggttgggttcgtcaagcgccgggtaaaggcctggaatgggttagctggatcatctcttccggcaccgaaacatattatgcggatagcgttaaaggtcgttttactattagccgtgataacagcaaaaataccctgtacctgcaaatgaatagcctgcgcgcggaagatactgctgtttactattgcgctaagagcctgggtcgtttcgattatttcggtcaaggtactctggttactgttagctct

SEQ ID NO: 2426 - protein, 108 aa, Homo sapiens
DIQMTQSPSSLSASVGDRVTITCRASRHISDWLHWYQQKPGKAPKLLIPWASGLWSGVPSRFSGSGSGTDFTLTISSLQPEDFATYYCLQEGWGPPTFGQGTKVEIKR

SEQ ID NO: 2427 - protein, 108 aa, Homo sapiens
DIQMTQSPSSLSASVGDRVTITCRASRHIGDWLHWYQQKPGKAPKLLIAWASTLDSGVPSRFSGSGSGTDFTLTISSLQPEDFATYYCLQEGWGPPTFGQGTKVEIKR

SEQ ID NO: 2428 - protein, 116 aa, Homo sapiens
EVQLLDSGGGLVQPGGSLRLSCAASGFTFRNFGMGWVRQAPGKGLEWVSWIDASGTETYYADPVKGRFTISRDNSKNTLYLQMNSLRAEDTAVYYCAKSLGRFDYWGQGTLVTVPS

SEQ ID NO: 2429 - protein, 116 aa, Homo sapiens
EVQLLDSGGGLVQPGGSLRLSCAASGFTFRNFGMGWVRQAPGKGLEWVSWILGSGTETYYADPVKGRFTISRDNSRNTLYLQMNSLRAEDTAVYYCAKSLGRFDYWGQGTLVTVSS

SEQ ID NO: 2430 - protein, 116 aa, Homo sapiens
EVQLLDSGGGLVQPGGSLRLSCAASGFTFRNFGMGWVRQAPGKGLEWVSWIVGSGTETYYADPVKGRFTISRDNSKNTLYLQMNSLRAEDTAVYYCAKSLGRFDYWGQGTLVTVSS

SEQ ID NO: 2431 - protein, 116 aa, Homo sapiens
EVQLLDSGGGLVQPGGSLRLSCAASGFTFRNFGMGWVRQAPGKGLEWVSWIEGGGTETYYADPVKGRFTISRDNSKNTLYLQMNSLRAEDTAVYYCAKSLGRFDYWGQGTLVTVSS

SEQ ID NO: 2432 - protein, 116 aa, Homo sapiens
EVQLLDSGGGLVQPGGSLRLSCAASGFTFRNFGMGWVRQAPGKGLEWVSWIISSGTETYYADPVKGRFTISRDNSKNTLYLQMNSLRAEDTAVYYCAKSLGRFDYWGQGTLVTVSG

SEQ ID NO: 2433 - protein, 116 aa, Homo sapiens
EVQLLESGGGLVQPGGSLRLSCAASGFTFRNFGMGWVRQAPGKGLEWVSWILGSGTETYYADSVKGRFTISRDNSKNTLYLQMNSLRAEDTAVYYCAKSLGRFDYWGQGTLVTVSS

SEQ ID NO: 2434 - protein, 116 aa, Homo sapiens
EVQLLESGGGLVQPGGSLRLSCAASGFTFRNFGMGWVRQAPGKGLEWVSWIISSGTETYYADSVKGRFTISRDNSKNTLYLQMNSLRAEDTAVYYCAKSLGRFDYWGQGTLVTVSS

SEQ ID NO: 2435 - protein, 116 aa, Homo sapiens
EVQLLESGGGLVQPGGSLRLSCAASGFTFRNYGMAWVRQAPGKGLEWVSWIEGGGTETYYADPVKGRFTISRDNSKNTLYLQMNSLRAEDTAVYYCAKSLGRFDYWGQGTLVTVSS

SEQ ID NO: 2436 - protein, 116 aa, Homo sapiens
EVQLLESGGGLVQPGGSLRLSCAASGFTFRNFGMGWVRQAPGKGLEWVSWIDASGTETYYADPVKGRFTISRDNSKNTLYLQMNSLRAEDTAVYYCAKSLGRFDYWGQGTLVTVSS

SEQ ID NO: 2437 - protein, 116 aa, Homo sapiens
EVQLLESGGGLVQPGGSLRLSCAASGFTFRNFGMGWVRQAPGKGLEWVSWILGSGTEEYYADSVKGRFTISRDNSKNTLYLQMNSLRAEDTAVYYCAKSLGRFDYWGQGTLVTVSS

SEQ ID NO: 2438 - protein, 116 aa, Homo sapiens
EVQLLESGGGLVQPGGSLRLSCAASGFTFRNFGMGWVRQAPGKGLEWVSWILGSGTEEYYADSVKGRFTISRDNSRNTLYLQMNSLRAEDTAVYYCAKSLGRFDYWGQGTLVTVSS

SEQ ID NO: 2439 - protein, 116 aa, Homo sapiens
EVQLLESGGGLVQPGGSLRLSCAASGFTFRNFGMGWVRQAPGKGLEWVSWIVGSGTEEYYADSVKGRFTISRDNSKNTLYLQMNSLRAEDTAVYYCAKSLGRFDYWGQGTLVTVSS

SEQ ID NO: 2440 - protein, 116 aa, Homo sapiens
EVQLLESGGGLVQPGGSLRLSCAASGFTFRNFGMGWVRQAPGKGLEWVSWIEGGGTEEYYADSVKGRFTISRDNSKNTLYLQMNSLRAEDTAVYYCAKSLGRFDYWGQGTLVTVSS

SEQ ID NO: 2441 - protein, 116 aa, Homo sapiens
EVQLLESGGGLVQPGGSLRLSCAASGFTFRNFGMGWVRQAPGKGLEWVSWIISSGTEEYYADSVKGRFTISRDNSKNTLYLQMNSLRAEDTAVYYCAKSLGRFDYWGQGTLVTVSS

SEQ ID NO: 2442 - protein, 116 aa, Homo sapiens
EVQLLESGGGLVQPGGSLRLSCAASGFTFRNFGMGWVRQAPGKGLEWVSWIEGGGTETYYADSVKGRFTISRDNSKNTLYLQMASLRAEDTAVYYCAKSLGRFDYWGQGTLVTVSS

SEQ ID NO: 2443 - protein, 116 aa, Homo sapiens
EVQLLESGGGLVQPGGSLRLSCAASGFTFRNFGMGWVRQAPGKGLEWVSWILGSGTETYYADSVKGRFTISRDNSKNTLYLQMASLRAEDTAVYYCAKSLGRFDYWGQGTLVTVSS

SEQ ID NO: 2444 - protein, 116 aa, Homo sapiens
EVQLLESGGGLVQPGGSLRLSCAASGFTFRNFGMGWVRQAPGKGLEWVSWIISSGTETYYADSVKGRFTISRDNSKNTLYLQMASLRAEDTAVYYCAKSLGRFDYWGQGTLVTVSS

SEQ ID NO: 2445 - protein, 116 aa, Homo sapiens
EVQLLESGGGLVQPGGSLRLSCAASGFTFRNFGMGWVRQAPGKGLEWVSWIISSGTETYYADSVKGRFTISRDNSKNTLYLQMNSLRAEDTAVYYCAKSYGAFDYWGQGTLVTVSS

SEQ ID NO: 2446 - protein, 116 aa, Homo sapiens
EVQLLESGGGLVQPGGSLRLSCAASGFTFRNFGMGWVRQAPGKGLEWVSWIISSGTETYYADSVKGRFTISRDNSKNTLYLQMNSLRDEDTAVYYCAKSLGRFDYWGQGTLVTVSS

SEQ ID NO: 2447 - protein, 116 aa, Homo sapiens
EVQLVESGGGLVQPGGSLRLSCAASGFTFRNFGMGWVRQAPGKGLEWVSWIISSGTETYYADSVKGRFTISRDNSKNTLYLQMTSLRAEDTAVYYCAKSLGRFDYWGQGTLVTVSS

SEQ ID NO: 2448 - protein, 116 aa, Homo sapiens
EVQLLESGGGLVQPGGSLRLSCAASGFTFRNFGMGWARQAPGKGLEWVSWIISSGTETYYADSVKGRFTISRDNSKNTLYLQMNSLRAEDTAVYYCAKSLGRFDYWGQGTLVTVSS

SEQ ID NO: 2449 - protein, 116 aa, Homo sapiens
EVQLLESGGGLVQPGGSLRLSCAASGFTFRNFGMGWARQAPGKPLEWVSWIISSGTETYYADSVKGRFTISRDNSKNTLYLQMNSLRAEDTAVYYCAKSLGRFDYWGQGTLVTVSS

SEQ ID NO: 2450 - protein, 116 aa, Homo sapiens
EVQLLESGGGLVQPGGSLRLSCAASGFTFRNFGMGWVRQAPGKELEWVSWIISSGTETYYADSVKGRFTISRDNSKNTLYLQMNSLRAEDTAVYYCAKSLGRFDYWGQGTLVTVSS

SEQ ID NO: 2451 - protein, 116 aa, Homo sapiens
EVQLLESGGGLVQPGGSLRLSCAASGFTFRNFGMGWVRQAPGKGLELVSWIISSGTETYYADSVKGRFTISRDNSKNTLYLQMNSLRAEDTAVYYCAKSLGRFDYWGQGTLVTVSS

SEQ ID NO: 2452 - protein, 116 aa, Homo sapiens
EVQLLESGGGLVQPGGSLRLSCAASGFTFRNFGMGWARQAPGKGLEWVSWIISSGTETYYADSVKGRFTISRDNSKNTLYLQMNSLRAEDTAVYYCAKSLGRFDYFGQGTLVTVSS

SEQ ID NO: 2453 - protein, 116 aa, Homo sapiens
EVQLLESGGGLVQPGGSLRLSCAASGFTFRNFGMGWVRQAPGKGLEWVSWIISSGTETYYADSVKGRFTISRDNSKNTLYLQMNSLRAEDTAVYYCAKSLGRFDYYGQGTLVTVSS

SEQ ID NO: 2454 - protein, 116 aa, Homo sapiens
EVQLLESGGGLVQPGGSLRLSCAASGFTFRNFGMGWVRQAPGKGLEWVSWIISSGTETYYADSVKGRFTISRDNSKNTLYLQMNSLRAEDTAVYYCAKSLGRFDYGGQGTLVTVSS

SEQ ID NO: 2455 - protein, 116 aa, Homo sapiens
EVQLLESGGGLVQPGGSLRLSCAASGFTFRNFGMGWVRQAPGKGLEWVSWIISSGTETYYADSVKGRFTISRDNSKNTLYLQMNSLRAEDTAVYYCAKSLGRFDYWGQGTQVTVSS
